(19) United States
(12) Patent Application Publication
(10) Pub. No.: US 2025/0277236 A1
(43) Pub. Date: Sep. 4, 2025

(54) VIRUS-DERIVED CONSTRUCT PLASMID LIBRARY AND CONSTRUCTION OF SAME

(71) Applicant: Synplogen Co., Ltd., Kobe-shi, Hyogo (JP)

(72) Inventors: Shunsuke SAITO, Kobe-shi (JP); Kenji TSUGE, Kobe-shi (JP); Yuya NISHIMURA, Kobe-shi (JP)

(73) Assignee: Synplogen Co., Ltd., Kobe-shi, Hyogo (JP)

(21) Appl. No.: 18/862,464

(22) PCT Filed: May 2, 2023
(86) PCT No.: PCT/JP2023/017130

§ 371 Date: Nov. 1, 2024

(30) Foreign Application Priority Data
May 2, 2022 (JP) 2022-076058

(51) Int. Cl. C12N 15/86; C12N 15/10

(52) U.S. Cl. CPC C12N 15/86; C12N 15/1093; C12N 2710/10043; C12N 2710/10051; C12N 2740/15043; C12N 2740/15051; C12N 2750/14043; C12N 2750/14051

(57) ABSTRACT

In one aspect, the present disclosure provides a method for producing various virus-derived construct plasmids from starting plasmids (for example, virus-derived construct plasmids of the present disclosure). In one embodiment, a method for producing virus-derived construct plasmids of the present disclosure includes a step of preparing a set of starting plasmids containing at least of a part of nucleic acid sequences required to construct a virus-derived construct, the set of starting plasmids including a set of corresponding alternative unit nucleic acids, and the set of corresponding alternative unit nucleic acids including at least one set of corresponding alternative unit nucleic acids containing different nucleic acid sequences; a step of treating the set of starting plasmids with a restriction enzyme and preparing a mixed solution containing cleaved alternative unit nucleic acid fragments; a step of ligating the cleaved alternative unit nucleic acid fragments to form an integrated nucleic acid; and a step of bringing the integrated nucleic acid into contact with a transformed organism to form virus-derived construct plasmids.

### TECHNICAL FIELD

[0001] The present disclosure provides a method for efficiently producing virus-derived construct plasmids. The present disclosure also provides a virus-derived construct plasmid library.

### BACKGROUND ART

[0002] Various virus-derived constructs such as adenoviral vectors (Patent Literature 1) have been developed for gene therapy, vaccine therapy, and the like.

[0003] For the preparation of virus-derived constructs, it is usually necessary to introduce virus-derived construct plasmids into producer cells. Therefore, synthesis and construction of virus-derived construct plasmids are required. Virus-derived construct plasmids are usually individually designed and produced, and improvement of plasmid performance, such as the amount of virus-derived constructs produced, often involves a lot of effort.

### CITATION LIST

### Patent Literature

[0004] Patent Literature 1: WO 2001/090392 A

### SUMMARY OF INVENTION

### Solution to Problem

[0005] The present inventors have found a method for efficiently producing various virus-derived construct plasmids. Based on this finding, the present disclosure provides a method for producing various virus-derived construct plasmids from starting plasmids. Furthermore, the present inventors provide a library of virus-derived construct plasmids produced by such a method.

[0006] Accordingly, the present disclosure provides the following.

### (Item 1)

[0007] A method for producing a virus-derived construct plasmid, the method including:
[0008] a step of preparing a set of starting plasmids containing at least of a part of nucleic acid sequences required to construct a virus-derived construct, the set of starting plasmids including a set of corresponding alternative unit nucleic acids, and the set of corresponding alternative unit nucleic acids including at least one set of corresponding alternative unit nucleic acids containing different nucleic acid sequences;
[0009] a step of treating the set of starting plasmids with a restriction enzyme and preparing a mixed solution containing cleaved alternative unit nucleic acid fragments;
[0010] a step of ligating the cleaved alternative unit nucleic acid fragments to form an integrated nucleic acid; and
[0011] a step of bringing the integrated nucleic acid into contact with a transformed organism to form a virus-derived construct plasmid.

### (Item 2)

[0012] The method according to any one of the above items, in which a population of virus-derived construct plasmids is produced.

### (Item 3)

[0013] The method according to any one of the above items, in which at least one of the sets of starting plasmids contains a transcriptional start sequence that functions in an animal cell, and a virus-derived construct plasmid containing the transcriptional start sequence that functions in an animal cell is produced.

### (Item 4)

[0014] The method according to any one of the above items, in which the set of starting plasmids includes three or more types of starting plasmids.

### (Item 5)

[0015] The method according to any one of the above items, in which the set of corresponding alternative unit nucleic acids includes at least two sets of corresponding alternative unit nucleic acids containing different nucleic acid sequences.

### (Item 6)

[0016] The method according to any one of the above items, further including a step of selecting a virus-derived construct plasmid having an excellent desired function from a population of the formed virus-derived construct plasmids.

### (Item 7)

[0017] The method according to any one of the above items, in which the desired function is an amount of virus-derived construct produced.

### (Item 8)

[0018] The method according to any one of the above items, in which the desired function is an amount of impurity mixed in a target virus-derived construct composition.

### (Item 9)

[0019] The method according to any one of the above items, in which the impurity is selected from a coat protein that does not contain a nucleic acid sequence, a coat protein that contains an incomplete nucleic acid sequence, an incomplete coat protein, and an incomplete nucleic acid sequence.

### (Item 10)

[0020] The method according to any one of the above items, in which the desired function is a purity of a target virus-derived construct in a target virus-derived construct composition.

### (Item 11)

[0021] The method according to any one of the above items, further including a step of preparing a virus-derived construct plasmid containing a combination of parallel alternative unit nucleic acids of the selected virus-derived construct plasmids.

### (Item 12)

[0022] The method according to any one of the above items, in which each of the sets of starting plasmids contains a nucleic acid sequence required to construct a virus-derived construct.

### (Item 13)

[0023] The method according to any one of the above items, in which at least of a part of the starting plasmids are plasmids produced by the method according to Item 1.

### (Item 14)

[0024] The method according to any one of the above items, in which the set of corresponding alternative unit nucleic acids includes at least two sets of corresponding alternative unit nucleic acids containing a nucleic acid sequence encoding at least of a part of different subtypes of the same gene.

### (Item 15)

[0025] The method according to any one of the above items, in which each of the sets of starting plasmids contains three or more types of alternative unit nucleic acids containing at least of a part of the nucleic acid sequences required to construct a virus-derived construct.

### (Item 16)

[0026] The method according to any one of the above items, in which the step of ligating to form the integrated nucleic acid includes adding a barcode nucleic acid.

### (Item 17)

[0027] The method according to any one of the above items, in which each of the sets of starting plasmids contains the nucleic acid sequence required to construct a virus-derived construct of about 10 kb or more.

### (Item 18)

[0028] The method according to any one of the above items, in which the nucleic acid sequence required to construct a virus-derived construct includes:
[0029] (A) a nucleic acid sequence including a terminal repeat;
[0030] (B) a nucleic acid sequence encoding a packaging factor;
[0031] (C) a nucleic acid sequence encoding a structural protein; and
[0032] (D) a nucleic acid sequence encoding a functional cofactor.

### (Item 19)

[0033] The method according to any one of the above items, in which the set of corresponding alternative unit nucleic acids includes a set of corresponding alternative unit nucleic acids encoding promoters whose types or directions are different.

### (Item 20)

[0034] The method according to any one of the above items, in which the set of corresponding alternative unit nucleic acids includes a set of corresponding alternative unit nucleic acids containing a drug-responsive promoter and containing different nucleic acid sequences encoding a promoter.

### (Item 21)

[0035] The method according to any one of the above items, in which the promoter includes a drug-responsive promoter.

### (Item 22)

[0036] The method according to any one of the above items, in which the set of corresponding alternative unit nucleic acids includes at least two sets of corresponding alternative unit nucleic acids containing different nucleic acid sequences selected from:
[0037] (A) a nucleic acid sequence including a terminal repeat;
[0038] (B) a nucleic acid sequence encoding a packaging factor;
[0039] (C) a nucleic acid sequence encoding a structural protein;
[0040] (D) a nucleic acid sequence encoding a functional cofactor;
[0041] (E) a nucleic acid sequence encoding a promoter;
[0042] (F) a nucleic acid sequence encoding a desired gene; and
[0043] (G) a nucleic acid sequence involved in host cell biosynthesis.

### (Item 23)

[0044] The method according to any one of the above items, in which the nucleic acid sequence involved in host cell biosynthesis contains a gene selected from the group consisting of SV40 Large T antigen (SV40LTA), TAX, Kras, Myc, MIR17HG, BCL-2, BCL-XL, PDIA2, XBP1, HSPA5, pyruvate carboxylase (PC), PDK, HIF1A, NRF2, and CPSF6.

### (Item 24)

[0045] The method according to any one of the above items, in which the set of corresponding alternative unit nucleic acids includes at least two sets of corresponding alternative unit nucleic acids containing different nucleic acid sequences encoding a desired gene.

### (Item 25)

[0046] The method according to any one of the above items, in which the set of corresponding alternative unit nucleic acids includes a set of corresponding alternative unit nucleic acids containing different nucleic acid sequences encoding a desired gene, and a set of corresponding alternative unit nucleic acids that are located adjacently upstream thereof and contain different nucleic acid sequences encoding a promoter.

### (Item 26)

[0047] The method according to any one of the above items, in which the starting plasmid contains a nucleic acid sequence including two terminal repeats, and an alternative unit nucleic acid encoding the desired gene is present between the nucleic acid sequences including two terminal repeats.

### (Item 27)

[0048] The method according to any one of the above items, in which the virus-derived construct is selected from a viral vector, a virus-like particle (VLP), an oncolytic virus, and a viral replicon.

### (Item 28)

[0049] The method according to any one of the above items, in which the virus-derived construct is a virus-derived construct of a virus selected from the group consisting of an alphavirus, a vaccinia virus, a measles virus, an influenza virus, a vesicular stomatitis virus, a coronavirus, a Sindbis virus, a Semliki Forest virus, a herpes simplex virus, a retrovirus, a lentivirus, a rabies virus, a Sendai virus, an adeno-associated virus, an adenovirus, a reovirus, a coxsackievirus, and a Newcastle disease virus.

### (Item 29)

[0050] The method according to any one of the above items, in which the virus-derived construct is a virus-derived construct of a virus selected from the group consisting of an adeno-associated virus, an adenovirus, a retrovirus, a lentivirus, a herpes simplex virus, and a Sendai virus.

### (Item 30)

[0051] The method according to any one of the above items, in which the virus-derived construct is a virus-derived construct of a virus selected from the group consisting of an adeno-associated virus or a lentivirus.

### (Item 31)

[0052] The method according to any one of the above items, in which the virus-derived construct is a viral vector of an adeno-associated virus.

### (Item 32)

[0053] The method according to any one of the above items, in which the set of corresponding alternative unit nucleic acids includes a set of corresponding alternative unit nucleic acids containing different inverted terminal repeats (ITRs) derived from any of adeno-associated virus serotypes 1 to 12 and variants thereof.

### (Item 33)

[0054] The method according to any one of the above items, in which the starting plasmid contains a promoter, a desired gene, and a terminator from upstream between a 5′ ITR and a 3′ ITR.

### (Item 34)

[0055] The method according to any one of the above items, in which the set of corresponding alternative unit nucleic acids includes a set of corresponding alternative unit nucleic acids containing different nucleic acid sequences encoding a functional cofactor derived from at least one of an adenovirus, a herpes virus, a papilloma virus, a bocavirus, and a simian virus.

### (Item 35)

[0056] The method according to any one of the above items, in which the set of corresponding alternative unit nucleic acids includes a set of corresponding alternative unit nucleic acids containing different nucleic acid sequences encoding a functional cofactor derived from any of adenovirus serotypes 1 to 52 and variants thereof.

### (Item 36)

[0057] The method according to any one of the above items, in which the functional cofactor includes at least one of adenoviruses E1A, E1B, E2A, E4, and VA, herpes viruses UL5, UL8, UL30, UL42, UL52, ICP0, ICP4, ICP8, and ICP22, papilloma viruses E1, E2, and E6, bocaviruses NP1, NS2, NS4, and BocaSR, and simian virus Large T antigen.

### (Item 37)

[0058] The method according to any one of the above items, in which the set of corresponding alternative unit nucleic acids includes a set of corresponding alternative unit nucleic acids containing different nucleic acid sequences encoding the functional cofactor, and a set of corresponding alternative unit nucleic acids that are located adjacently upstream thereof and contain different nucleic acid sequences encoding a promoter.

### (Item 38)

[0059] The method according to any one of the above items, in which the starting plasmid contains E2A, E4, and VA.

### (Item 39)

[0060] The method according to any one of the above items, in which the set of corresponding alternative unit nucleic acids includes a set of corresponding alternative unit nucleic acids containing different nucleic acid sequences encoding rep.

### (Item 40)

[0061] The method according to any one of the above items, in which the rep includes at least one of rep78, rep76, rep52, and rep40.

### (Item 41)

[0062] The method according to any one of the above items, in which the set of corresponding alternative unit nucleic acids includes a set of corresponding alternative unit nucleic acids containing different nucleic acid sequences encoding the rep, and a set of corresponding alternative unit nucleic acids that are located adjacently upstream thereof and contain different nucleic acid sequences encoding a promoter.

### (Item 42)

[0063] The method according to any one of the above items, in which the set of corresponding alternative unit nucleic acids encoding rep includes a set of corresponding alternative unit nucleic acids containing different nucleic acid sequences derived from any of adeno-associated virus serotypes 1 to 12 and variants thereof.

### (Item 43)

[0064] The method according to any one of the above items, in which the set of corresponding alternative unit nucleic acids includes a set of corresponding alternative unit nucleic acids containing different nucleic acid sequences encoding cap.

### (Item 44)

[0065] The method according to any one of the above items, in which the cap includes at least one of VP1, VP2, VP3, AAP, and MAAP.

### (Item 45)

[0066] The method according to any one of the above items, in which the set of corresponding alternative unit nucleic acids includes a set of corresponding alternative unit nucleic acids containing different nucleic acid sequences encoding the cap, and a set of corresponding alternative unit nucleic acids that are located adjacently upstream thereof and contain different nucleic acid sequences encoding a promoter.

### (Item 46)

[0067] The method according to Item 43, in which the set of corresponding alternative unit nucleic acids encoding cap includes a set of corresponding alternative unit nucleic acids containing different nucleic acid sequences derived from any of adeno-associated virus serotypes 1 to 12 and variants thereof.

### (Item 47)

[0068] The method according to any one of the above items, in which the starting plasmid contains a 5′ ITR, a promoter, a desired gene, a 3′ ITR, rep, cap, and a functional cofactor.

### (Item 48)

[0069] The method according to any one of the above items, in which the starting plasmid contains a 5′ ITR, a 3′ ITR, rep, and cap, one of the rep and the cap is located downstream of a region sandwiched between the 5′ ITR and the 3′ ITR, and the other one of the rep and the cap is located upstream of the region sandwiched between the 5′ ITR and the 3′ ITR.

### (Item 49)

[0070] The method according to any one of the above items, in which the starting plasmid contains two ITRs and another portion of the nucleic acid sequence required to construct a virus-derived construct, and the another portion is outside a region sandwiched between the two ITRs.

### (Item 50)

[0071] The method according to any one of the above items, in which the starting plasmid contains a 5′ ITR, a promoter, a desired gene, a 3′ ITR, rep, cap, and a functional cofactor in this order.

### (Item 51)

[0072] The method according to any one of the above items, in which the starting plasmid contains a first promoter, a first rep, a second promoter, a second rep, a third promoter, and cap in this order.

### (Item 52)

[0073] The method according to any one of the above items, in which the virus-derived construct is a viral vector of a lentivirus.

### (Item 53)

[0074] The method according to any one of the above items, in which the set of corresponding alternative unit nucleic acids includes a set of corresponding alternative unit nucleic acids containing different long terminal repeats (LTRs) derived from a lentivirus or variants thereof.

### (Item 54)

[0075] The method according to any one of the above items, in which the starting plasmid contains a promoter, a desired gene, and a terminator from upstream between a 5′ LTR and a 3′ LTR.

### (Item 55)

[0076] The method according to any one of the above items, in which the starting plasmid contains two or more sets of the promoter, the desired gene, and the terminator.

### (Item 56)

[0077] The method according to any one of the above items, in which the set of corresponding alternative unit nucleic acids includes a set of corresponding alternative unit nucleic acids containing different nucleic acid sequences encoding a functional cofactor selected from tat and rev.

### (Item 57)

[0078] The method according to any one of the above items, in which the set of corresponding alternative unit nucleic acids includes a set of corresponding alternative unit nucleic acids containing different nucleic acid sequences encoding the functional cofactor, and a set of corresponding alternative unit nucleic acids that are located adjacently upstream thereof and contain different nucleic acid sequences encoding a promoter.

### (Item 58)

[0079] The method according to any one of the above items, in which the set of corresponding alternative unit nucleic acids includes a set of corresponding alternative unit nucleic acids containing different nucleic acid sequences encoding a structural protein selected from gag, pol, VSV-G, and env.

### (Item 59)

[0080] The method according to any one of the above items, in which the set of corresponding alternative unit nucleic acids includes a set of corresponding alternative unit nucleic acids containing different nucleic acid sequences encoding the structural protein, and a set of corresponding alternative unit nucleic acids that are located adjacently upstream thereof and contain different nucleic acid sequences encoding a promoter.

### (Item 60)

[0081] The method according to any one of the above items, in which the virus-derived construct is a viral vector of an adenovirus.

### (Item 61)

[0082] The method according to any one of the above items, in which the set of corresponding alternative unit nucleic acids includes a set of corresponding alternative unit nucleic acids containing different inverted terminal repeats (ITRs) derived from an adenovirus.

### (Item 62)

[0083] The method according to any one of the above items, in which the starting plasmid contains a promoter, a desired gene, and a terminator from upstream between a 5′ ITR and a 3′ ITR.

### (Item 63)

[0084] The method according to any one of the above items, in which the starting plasmid contains two or more sets of the promoter, the desired gene, and the terminator.

### (Item 64)

[0085] The method according to any one of the above items, in which the set of corresponding alternative unit nucleic acids includes a set of corresponding alternative unit nucleic acids containing different nucleic acid sequences encoding a structural protein selected from L1, L2, L3, L4, and L5.

### (Item 65)

[0086] The method according to any one of the above items, in which the set of corresponding alternative unit nucleic acids includes a set of corresponding alternative unit nucleic acids containing different nucleic acid sequences encoding the structural protein, and a set of corresponding alternative unit nucleic acids that are located adjacently upstream thereof and contain different nucleic acid sequences encoding a promoter.

### (Item 66)

[0087] The method according to any one of the above items, in which the set of corresponding alternative unit nucleic acids encoding a structural protein includes a set of corresponding alternative unit nucleic acids containing different nucleic acid sequences derived from any of adenovirus serotypes 1 to 52 and variants thereof.

### (Item 67)

[0088] The method according to any one of the above items, in which the set of corresponding alternative unit nucleic acids includes a set of corresponding alternative unit nucleic acids containing different nucleic acid sequences encoding a functional cofactor selected from E1A, E1B, E2A, E2B, and E4.

### (Item 68)

[0089] The method according to any one of the above items, in which the set of corresponding alternative unit nucleic acids includes a set of corresponding alternative unit nucleic acids containing different nucleic acid sequences encoding the functional cofactor, and a set of corresponding alternative unit nucleic acids that are located adjacently upstream thereof and contain different nucleic acid sequences encoding a promoter.

### (Item 69)

[0090] The method according to any one of the above items, in which the set of corresponding alternative unit nucleic acids encoding a functional cofactor includes a set of corresponding alternative unit nucleic acids containing different nucleic acid sequences derived from any of adenovirus serotypes 1 to 52 and variants thereof.

### (Item 70)

[0091] The method according to any one of the above items, in which the virus-derived construct plasmid enables production of a virus-derived construct in a producer cell into which the virus-derived construct plasmid is introduced alone.

### (Item 71)

[0092] A method for constructing a virus-derived construct plasmid library by performing the method according to any one of the above items.

### (Item 72)

[0093] A method for constructing a virus-derived construct plasmid library by performing the method according to any one of the above items, in which the set of corresponding alternative unit nucleic acids includes a plurality of sets of corresponding alternative unit nucleic acids containing different nucleic acid sequences, and provides 64 or more combinations of parallel alternative unit nucleic acids.

### (Item 73)

[0094] A virus-derived construct plasmid or a virus-derived construct plasmid library produced by the method according to any one of the above items.

### (Item 74)

[0095] A virus-derived construct plasmid library containing a virus-derived construct plasmid containing three or more alternative unit nucleic acids as a series of parallel alternative unit nucleic acids, in which the virus-derived construct plasmid library contains a plurality of sets of corresponding alternative unit nucleic acids containing different nucleic acid sequences, and the parallel alternative unit nucleic acids on each virus-derived construct plasmid of the plurality of sets of corresponding alternative unit nucleic acids containing different nucleic acid sequences have a length of about 10 kb or more.

### (Item 74A)

[0096] A virus-derived construct plasmid library containing a plurality of virus-derived construct plasmids, in which different portions in a combination in the plurality of virus-derived construct plasmids contain a nucleic acid sequence that is a promoter or a functional cofactor.

### (Item 74B)

[0097] The virus-derived construct plasmid library according to any one of the above items, in which the plurality of virus-derived construct plasmids in the virus-derived construct plasmid library contain elements that constitute the different portions in the combination, the elements being differ from one another in a serotype of a virus from which they are derived.

### (Item 74C)

[0098] The virus-derived construct plasmid library according to any one of the above items, in which the elements that constitute the different portions in the combination of the plurality of virus-derived construct plasmids in the virus-derived construct plasmid library contain promoters, and the promoters in the plurality of virus-derived construct plasmids include promoters operably linked to genes that are different from each other in nature.

### (Item 75)

[0099] The virus-derived construct plasmid library according to any one of the above items, in which the plurality of sets of corresponding alternative unit nucleic acids containing different nucleic acid sequences include a set of corresponding alternative unit nucleic acids containing at least one different nucleic acid sequence of:
[0100] (A) a nucleic acid sequence including a terminal repeat;
[0101] (B) a nucleic acid sequence encoding a packaging factor;
[0102] (C) a nucleic acid sequence encoding a structural protein; and
[0103] (D) a nucleic acid sequence encoding a functional cofactor.

### (Item 76)

[0104] The virus-derived construct plasmid library according to any one of the above items, in which each virus-derived construct plasmid contains:
[0105] (A) a nucleic acid sequence including a terminal repeat;
[0106] (B) a nucleic acid sequence encoding a packaging factor;
[0107] (C) a nucleic acid sequence encoding a structural protein; and
[0108] (D) a nucleic acid sequence encoding a functional cofactor.

### (Item 77)

[0109] The virus-derived construct plasmid library according to any one of the above items, in which the plurality of sets of corresponding alternative unit nucleic acids containing different nucleic acid sequences contain an alternative unit nucleic acid having a GC content of 75% or more.

### (Item 78)

[0110] The virus-derived construct plasmid library according to any one of the above items, in which the plurality of sets of corresponding alternative unit nucleic acids containing different nucleic acid sequences include a plurality of sets of corresponding alternative unit nucleic acids that allow for 64 or more different parallel alternative unit nucleic acid combinations, and each virus-derived construct plasmid contains the same number of parallel alternative unit nucleic acids.

### (Item 79)

[0111] The virus-derived construct plasmid library according to any one of the above items, in which each virus-derived construct plasmid contains a barcode nucleic acid sequence.

### (Item 80)

[0112] A virus-derived construct plasmid contained in the virus-derived construct plasmid library according to any one of the above items.

### (Item 81)

[0113] A method for producing virus-derived construct, the method including:
[0114] a step of preparing a virus-derived construct plasmid by the method according to any one of the above items; and
[0115] a step of introducing the virus-derived construct plasmid into a producer cell to form a virus-derived construct.

### (Item 82)

[0116] A method for producing a virus-derived construct library, the method including:
[0117] a step of preparing a population of virus-derived construct plasmids by the method according to any one of the above items; and
[0118] a step of introducing the population of virus-derived construct plasmids into a producer cell and forming a virus-derived construct to construct a virus-derived construct library.

### (Item 83)

[0119] The method according to any one of the above items, in which the step of introducing the virus-derived construct plasmid into the producer cell includes introducing a single virus-derived construct plasmid into a producer cell.

### (Item 84)

[0120] The method according to any one of the above items, in which at least some of at least of a part of the nucleic acids contained in the virus-derived construct plasmid are incorporated into a chromosome of the producer cell.

### (Item 85)

[0121] A producer cell prepared by the method according to any one of the above items.

### (Item 86)

[0122] A virus-derived construct produced by the method according to any one of the above items.

### (Item 87)

[0123] A virus-derived construct-containing composition produced by the method according to any one of the above items.

[0124] In the present disclosure, it is intended that one or a plurality of features can be provided in further combination in addition to the specified combination. Still further embodiments and advantages of the present disclosure will be appreciated by those skilled in the art upon reading and understanding the following detailed description, as necessary.

### Advantageous Effects of Invention

[0125] According to the present disclosure, it is possible to efficiently produce virus-derived construct plasmids having improved performance.

### BRIEF DESCRIPTION OF DRAWINGS

[0126] FIG. 1 illustrates an outline of a structure of a seed plasmid used in Examples.

[0127] FIG. 2 illustrates an outline of structures of five types of seed plasmids produced first.

[0128] FIG. 3 illustrates an outline of structures of eight types of seed plasmids to which additional seed plasmids are added.

[0129] FIG. 4 illustrates the number of genomic copies of rAAV produced from each of plasmids Control, #20, #24, and #46. The vertical axis indicates the number of genomic copies per 1 mL.

[0130] FIG. 5 illustrates a measurement result of purified rAAV produced from plasmid #46 by a mass spectrometry method. The horizontal axis indicates the measured mass (kDa) and the vertical axis indicates the counts detected at the corresponding mass.

[0131] FIG. 6 illustrates examples of construction of a plasmid assumed for a structure of a virus-derived construct plasmid.

[0132] FIG. 7 illustrates examples of construction of a plasmid assumed for a structure of a virus-derived construct plasmid.

[0133] FIG. 8 illustrates examples of construction of a plasmid assumed for a structure of a virus-derived construct plasmid.

[0134] FIG. 9 illustrates examples of construction of a plasmid assumed for a structure of a virus-derived construct plasmid.

[0135] FIG. 10 illustrates examples of construction of a plasmid assumed for a structure of a virus-derived construct plasmid.

[0136] FIG. 11 illustrates an outline of a structure of seed plasmids formed for producing a combinatorial library in Example 4.

[0137] FIG. 12 illustrates an AAV particle producing ability of the viral vector plasmid clones obtained in Example 4. The horizontal axis indicates the clone number, and the vertical axis indicates the amount of AAV particles produced (the number of genomic copies).

[0138] FIG. 13 illustrates an outline of a structure of seed plasmids formed for producing a combinatorial library in Example 5.

[0139] FIG. 14 illustrates an AAV particle producing ability of the viral vector plasmid clones obtained in Example 5. The horizontal axis indicates the clone number, and the vertical axis indicates the amount of AAV particles produced (the number of genomic copies).

### DESCRIPTION OF EMBODIMENTS

[0140] Hereinafter, the present disclosure will be described while showing the best mode. Throughout the present specification, the expression of singular forms is to be understood as including the concept of plural forms unless otherwise stated. Therefore, the singular article (for example, “a”, “an”, “the”, or the like in English) should be understood to include the concept of plural forms unless otherwise stated. In addition, the terms used As used herein are to be understood as being used in the sense commonly used in the art unless otherwise stated. Therefore, unless defined otherwise, all technical and scientific terms used As used herein have the same meaning as commonly understood by those skilled in the art to which the present disclosure pertains. In the case of conflict, the present specification (including definitions) will control.

[0141] Hereinafter, the definitions of the terms and/or basic technical concepts that are particularly used As used herein will be described as appropriate.

[0142] As used herein, the term “plasmid” refers to circular DNA that is present separately from chromosomes in cells or that is present separately from chromosomes when introduced into cells. Since a method of the present disclosure can produce plasmids using plasmids as starting materials, the plasmids used as starting materials in the method may be referred to as “starting plasmids”, and the produced plasmids may be referred to as “product plasmids”. The totality of starting plasmids present in one reaction solution or for forming one reaction solution may be referred to as “set of starting plasmids” As used herein.

[0143] The Ordered Gene Assembly in Bacillus subtilis (OGAB) method used in the method of the present disclosure is a method of incorporating an integrated nucleic acid into a transformed organism to produce circular plasmids in the organism (details are described elsewhere As used herein). Any organism capable of incorporating acyclic long nucleic acids and producing plasmids can be used in the OGAB method, and such an organism is referred to as “transformed organism” As used herein. The nucleic acid to be incorporated into the transformed organism is referred to as “integrated nucleic acid” As used herein, typically, the integrated nucleic acid has a tandem repeat-like structure wherein nucleic acid units having the same sequence repeatedly appear in the same direction, and the use of the integrated nucleic acid having such a structure can promote the production of plasmids in the transformed organism. As used herein, the term “unit nucleic acid” refers to a nucleic acid fragment having a portion of the sequence constituting the sequence of the integrated nucleic acid or a portion that produces such a nucleic acid fragment, and typically refers to a nucleic acid fragment containing a protruding sequence generated by a restriction enzyme treatment at both ends or a nucleic acid region sandwiched between two protruding sequences generated by a restriction enzyme treatment.

[0144] As used herein, the term “corresponding” between a plurality of unit nucleic acids refers to a relationship in which these unit nucleic acids that are nucleic acid fragments contain the same protruding sequence, or a relationship in which the same protruding sequence is generated when a plurality of nucleic acid molecules (typically, plasmids) each containing these unit nucleic acids are treated with a specific restriction enzyme. As used herein, unit nucleic acids corresponding to each other are referred to as “alternative unit nucleic acids”, when fragmented alternative unit nucleic acids are integrated to produce an integrated nucleic acid and a plasmid is formed by the OGAB method, the alternative unit nucleic acids can be incorporated into the same position on the plasmid (for example, unit nucleic acids of the same order counted from the transcription initiation point, and the like). The base sequences other than the protruding sequences of the plurality of alternative unit nucleic acids may be the same or different. The totality of alternative unit nucleic acids present in one reaction solution or in a set of starting plasmids for forming one reaction solution may be referred to as “set of alternative unit nucleic acids” As used herein. The totality of alternative unit nucleic acids is also used as a set of alternative unit nucleic acids at position A or the like.

[0145] As used herein, the term “parallel” of a plurality of unit nucleic acids refers to a relationship in which these unit nucleic acids that are nucleic acid fragments contain different protruding sequences, or a relationship in which different protruding sequences are generated when nucleic acid molecules (typically, plasmids) containing these unit nucleic acids are treated with a specific restriction enzyme. Typically, the parallel unit nucleic acids are present on the same plasmid. As used herein, the phrase “two unit nucleic acids are adjacent to each other” refers to a relationship in which the unit nucleic acids contain complementary protruding sequences, or a relationship in which complementary protruding sequences are generated when nucleic acid molecules (typically, plasmids) containing these unit nucleic acids are treated with a specific restriction enzyme, and typically refers to a relationship in which the unit nucleic acids are located on both sides of a cleavage position in a restriction enzyme treatment. The totality of parallel unit nucleic acids present on a plasmid or generated by treating a plasmid with a restriction enzyme may be referred to as “series of parallel unit nucleic acids” As used herein. The totality of parallel unit nucleic acids is also used as a series of parallel unit nucleic acids and the like on a starting plasmid 1.

[0146] As used herein, a nucleic acid that can be defined by a terminal sequence or a protruding sequence of a nucleic acid molecule, such as an alternative unit nucleic acid, can refer to any of the form of a nucleic acid fragment having a terminal portion or a protruding portion of the sequence and a partial region in the nucleic acid molecule that can potentially form the terminal portion or the protruding portion, unless otherwise specified. When described as a “nucleic acid fragment”, it actually has a terminal portion or a protruding portion of the sequence.

[0147] As used herein, the term “Bacillus subtilis” refers to an aerobic, gram-positive, catalase-positive bacterium that is commonly present in soil and plants and is present in the gastrointestinal tract of ruminants and humans, and refers to any bacterium having no pathogenicity and having a natural transformation ability, including the scientific name Bacillus subtilis or Bacillus amyloliquefaciens, Bacillus licheniformis, Bacillus pumilus, or the like, which is a bacterium belonging to the genus Bacillus that is regarded as being a spore-forming bacteria, which has a size of 0.7 to 0.8×2.3 μm, is mesophilic, and has an optimal growth temperature of 25 to 40° C. In a preferred embodiment, Bacillus subtilis is Marburg 168 strain or its derivative strain, RM125 strain, which is a strain with a high natural transformation ability in Bacillus subtilis. The 168 strain is the most genetically studied gram-positive bacterium and is available from the American Type Culture Collection (ATCC) and the like together with the RM125 strain, and can be suitably used in the present disclosure because it is harmless to humans and animals itself and the OGAB method is known to be applicable.

[0148] As used herein, the term “library” refers to a population of homogenous substances (plasmids, viral vectors, and the like) having similar structures. Examples of the similar structure include a structure having a similar base sequence length (for example, a difference between the base lengths is within 10%), a structure in which a series of parallel unit nucleic acids has the same number of unit nucleic acids, and a structure in which different portions have the same function (for example, different serotypes of the same gene and promoters that function in the same host cell).

[0149] As used herein, the term “packaging cell” refers to a cell for producing virus-derived construct plasmids.

[0150] As used herein, the term “virus-derived construct plasmid” refers to a plasmid for producing a virus-derived construct in a producer cell containing genes loaded on the virus-derived construct. The virus-derived construct plasmid may contain a sequence of a gene (desired gene) to be expressed in a target cell of a virus-derived construct between two terminal repeats, may further contain a promoter, and may further contain other elements (for example, an enhancer, a terminator, or the like).

[0151] As used herein, the term “producer cell” means a cell capable of producing a desired virus-derived construct, and may be a cell in which a gene required for producing a virus-derived construct is expressed from a chromosome and an introduced plasmid. A desired virus-derived construct can be produced by introducing the virus-derived construct plasmids of the present disclosure into producer cells. For example, in the case of an adeno-associated virus (AAV) vector, E1A and E1B are required for production thereof, but since HEK293 has E1A and E1B, E1A and E1B can be removed from a helper plasmid. Other cells also function as producer cells when modified to have such functional cofactors.

[0152] As used herein, the term “animal cell” refers to a cell obtained from an animal (human, mouse, rat, monkey, dog, or the like) or a cell obtained by modifying a cell obtained from an animal.

[0153] As used herein, the term “virus-derived construct” refers to a construct containing a nucleic acid construct at least partially having a structure derived from a virus or a protein produced therefrom. Examples of the virus-derived construct include a viral vector, a virus-like particle (VLP), an oncolytic virus (including a virus modified to proliferate only in cancer cells), and a viral replicon (self-replicating viral genome lacking the ability to produce viral particles).

[0154] As used herein, the term “viral vector” refers to a construct that at least partially has a structure derived from a virus and is capable of introducing a nucleic acid into a target cell. Typically, the viral vector is in the form of viral particles containing nucleic acids containing viral structural proteins and heterologous genes.

[0155] As used herein, the term “nucleic acid sequence required to construct a virus-derived construct” refers to a nucleic acid sequence (for example, a combination of nucleic acid sequences) that enables a producer cell containing the nucleic acid sequence to produce a virus-derived construct. In one embodiment, the nucleic acid sequence required to construct a virus-derived construct includes a nucleic acid sequence encoding a structural protein of a virus, a nucleic acid sequence encoding a packaging factor, and a nucleic acid sequence encoding two terminal repeats of a virus and a functional cofactor. The term “nucleic acid sequence encoding a functional cofactor” may include or consist essentially of, for example, a nucleic acid sequence encoding a structural protein of a virus, a nucleic acid sequence encoding a packaging factor, a nucleic acid sequence required to construct any viral-derived construct other than two viral terminal repeats of a virus. Each of these nucleic acid sequences can vary for each virus-derived construct. These details are described elsewhere As used herein. In a preferred embodiment, as the nucleic acid sequence required to construct a virus-derived construct, an advantageous sequence common to AAV and adenovirus can be utilized, and more preferably, an advantageous sequence for AAV can be utilized. The advantageous sequence common to such AAV and adenovirus is characterized by containing a desired gene between inverted terminal repeats (ITRs) and optionally a functional cofactor, rep, and cap, or L1, L2, L3, L4, and L5, and the advantageous sequence for AAV contains a desired gene between ITRs and optionally a functional cofactor, rep, and cap. The arrangement of the functional cofactor, rep, and cap has the characteristic that it may be outside the two ITRs. For example, examples thereof include, but are not limited to, sequences of specific functional cofactors E1A, E1B, E2A, E2B, E3, and E4.

[0156] As used herein, the term “packaging factor” includes a protein that encapsulates the genome of a virus in a structural protein, and examples thereof include rep and ψ. Without intending to be limiting, a packaging factor derived from any of adenovirus serotypes 1 to 52 or adeno-associated virus serotypes 1 to 12, or variants thereof (rh10, DJ, DJ/8, PHP.eB, PHP.S, AAV2-retro, AAV2-QuadYF, AAV2.7m8, AAV6.2, rh. 74, AAV2.5, AAV-TT, Anc80, and the like) can be utilized. The protein may be either naturally occurring or artificially mutated. The “artificial mutated” protein can be produced by, for example, introducing an appropriate mutation into a naturally occurring sequence described in a known literature.

[0157] As used herein, the term “structural protein” refers to a protein produced from a gene of a virus, at least a portion of which is present on the surface of the virus or a virus-derived construct (for example, crossing an envelope). A structural protein can be responsible for infectivity into cells.

[0158] As used herein, the term “capsid” refers to a protein produced from a gene of a virus (encapsulated in an envelope, as necessary) that is present on the surface of the virus or a virus-derived construct, and is also referred to as “capsid protein”.

[0159] As used herein, the term “repetitive sequence” or “tandem repeat” (a nucleic acid sequence) is a generic term for a nucleic acid sequence of a biological genome in which the same sequence is repeatedly (particularly several times or more) found. Any repetitive sequence used in the art can be used in the present disclosure. Typically, a promoter sequence appears repeatedly.

[0160] As used herein, the term “terminal repeat” is a generic term for those present at the terminal among those in which the same sequence is found repeatedly (particularly several times or more) in the nucleic acid sequence of the biological genome. Examples of the terminal repeat include, but are not limited to, an inverted terminal repeat (ITR) or a long terminal repeat (LTR). A terminal repeat derived from any of adenovirus serotypes 1 to 52 or adeno-associated virus serotypes 1 to 12, or variants thereof (rh10, DJ, DJ/8, PHP.eB, PHP.S, AAV2-retro, AAV2-QuadYF, AAV2.7m8, AAV6.2, rh. 74, AAV2.5, AAV-TT, Anc80, and the like) can be utilized. The terminal repeat may be either naturally occurring or artificially mutated. The “artificial mutated” protein can be produced by, for example, introducing an appropriate mutation into a naturally occurring sequence described in a known literature.

[0161] As used herein, the term “functional cofactor” refers to a gene that supports amplification of a virus that cannot proliferate alone. In the present disclosure, examples of the functional cofactor include, but are not limited to, a nucleic acid sequence encoding a packaging factor of the virus, and a nucleic acid sequence required to construct, proliferate, enhance activity, or reduce toxicity of any virus-derived construct other than the two terminal repeats of the virus. Examples of the functional cofactor that can be used include, but are not limited to, E1A, E1B, E2A, E2B, E4, RPE, WRPE, PPT, oPRE, an enhancer, an insulator, and a silencer sequence.

[0162] As used herein, the term “loaded nucleic acid” means a nucleic acid carried by a virus-derived construct (a viral vector or the like). Whether or not it is a loaded nucleic acid can be confirmed by treating a virus-derived construct preparation with DNase to decompose the nucleic acid outside the viral particle, inactivating the DNase, and then confirming the nucleic acid extracted from the viral particle. Whether or not it is a loaded nucleic acid can also be confirmed by examining the sequence of the resulting nucleic acid product (preferably a full-length or a length close to the full-length).

[0163] As used herein, the term “host cell” refers to a cell (including the progeny of such a cell) into which an exogenous nucleic acid or protein or viral or virus-derived construct is introduced.

[0164] As used herein, the terms “protein”, “polypeptide”, and “peptide” are used interchangeably, and refer to an amino acid polymer of any length. The polymer may be linear, branched, or cyclic. An amino acid may be a naturally-occurring, non-naturally occurring, or modified amino acid. The term also encompasses naturally or artificially modified polymers. Examples of such a modification include disulfide bond formation, glycosylation, lipidation, acetylation, phosphorylation, and any other manipulation or modification (for example, conjugation with a labeling component).

[0165] As used herein, the terms “polynucleotide” and “nucleic acid” are used interchangeably, and refer to a polymer of nucleotides of any length. Examples of the nucleic acid include DNA, RNA, cDNA, mRNA, rRNA, tRNA, microRNA (miRNA), and lncRNA. The term also includes a “polynucleotide derivative”. The “polynucleotide derivative” refers to a polynucleotide containing a nucleotide derivative or having an unusual internucleotidic linkage. The “nucleotide derivative” refers to a nucleotide having a structure different from a normal nucleotide used in natural DNA or RNA, and examples thereof include a locked nucleic acid (LNA), an ethylene nucleic acid such as a 2′-O, 4′-C-ethylene-bridged nucleic acid (ENA), other bridged nucleic acids (BNAs), a hexitol nucleic acid (HNA), an amido-bridged nucleic acid (AmNA), a morpholino nucleic acid, tricyclo-DNA (tcDNA), a polyether nucleic acid (see, for example, U.S. Pat. No. 5,908,845), and a cyclohexene nucleic acid (CENA). Examples of the unusual internucleotidic linkage include an internucleotidic linkage in which a phosphate diester linkage is converted to a phosphorothioate linkage, an internucleotidic linkage in which a phosphate diester linkage is converted to an N3′-P5′ phosphoramidate linkage, and an internucleotidic linkage in which ribose and a phosphate diester linkage are converted to peptide nucleic acid linkages.

[0166] Unless otherwise indicated, a particular nucleic acid sequence is also intended to encompass a conservatively modified variant (for example, a degenerate codon substituent) and a complementary sequence thereof, as well as the sequence explicitly indicated. Specifically, the degenerate codon substituent can be achieved by creating a sequence in which the third position of one or more selected (or all) codons is substituted with a mixed-base and/or deoxyinosine residue. For example, variants based on specific wild-type sequences, such as adenovirus serotypes 1 to 52 and adeno-associated virus serotypes 1 to 12, contain, in addition to variants (for example, rh10, DJ, DJ/8, PHP.eB, PHP.S, AAV2-retro, AAV2-QuadYF, AAV2.7m8, AAV6.2, rh.74, AAV2.5, AAV-TT, Anc80, and the like), nucleic acids containing a sequence having at least 70%, at least 80%, at least 85%, at least 90%, at least 95%, at least 96%, at least 97%, at least 98%, at least 99%, or at least 99.5% sequence identity to the original sequence.

[0167] As used herein, the term “gene” refers to a nucleic acid portion that performs a certain biological function. Examples of the biological function include coding a polypeptide or protein, coding protein-non-coding functional RNA (rRNA, tRNA, microRNA (miRNA), lncRNA, or the like), controlling the production of a polypeptide, protein, or protein-non-coding functional RNA, specifically binding to a specific protein, and controlling the cleavage a nucleic acid or replication. Therefore, As used herein, in addition to the nucleic acid portion encoding a protein or non-protein-coding functional RNA, the gene contains a transcriptional/translational regulatory sequence such as a promoter, a terminator, an enhancer, an insulator, a silencer, an origin of replication, or an internal ribosome entry site, and a nucleic acid portion required for packaging into viral particles. As used herein, the term “gene product” may refer to a polypeptide, protein, or non-protein coding functional RNA encoded by a gene.

[0168] As used herein, the fact that two genes are cis refers to that the genes are present on the same nucleic acid molecule or a nucleic acid molecule of a complementary strand (in the case of a double-stranded nucleic acid). In addition, As used herein, the fact that two genes are trans refers to that, in a cell (in an organism), these genes are not present on the same nucleic acid molecule or a nucleic acid molecule of a complementary strand (in the case of a double-stranded nucleic acid). For example, the gene present on the genome and the gene on the nucleic acid introduced with the virus-derived construct can be trans. As necessary, whether or not two genes are trans can be determined in a state at the time when the two genes become simultaneously present in a cell (for example, introduction of a nucleic acid into a cell).

[0169] When referring to the number of genes As used herein, one gene refers to a gene that contains a continuous sequence in a form that is normally (most frequent or 50% or more probability) present on the genome of an organism. For example, two exons encoding a protein can be two genes. For example, when the promoter sequence and the sequence encoding the protein form a continuous sequence, the nucleic acid portion containing the promoter sequence and the sequence encoding the protein can be one gene. For example, when a protein that becomes functional when cleaved is encoded by a continuous sequence on the genome, the protein can be encoded by one gene. When referring to a gene in terms of function, the nucleic acid sequence does not need to be a continuous sequence, for example, a plurality of exons encoding a protein are collectively referred to as genes of the protein.

[0170] As used herein, the term “deficiency” of a gene refers to that the nucleic acid does not contain the gene or contain a gene that is modified so as not to perform the normal function (for example, the function of producing a functional protein) of the gene.

[0171] As used herein, the term “operably linked” refers to the placement of expression (actuation) of a desired sequence under the control of a transcriptional/translational regulatory sequence (for example, a promoter, an enhancer, or the like) or a translational regulatory sequence. In order for a promoter to be operably linked to a gene, the promoter is usually arranged immediately upstream of the gene, but not necessarily adjacent.

[0172] As used herein, the term “transcriptional/translational regulatory sequence” collectively refers to a promoter sequence, a polyadenylation signal, a transcription termination sequence, an upstream regulatory domain, an origin of replication, an enhancer, IRES, and the like, which act in combination to enable the replication, transcription, and translation of a coding sequence in a recipient cell. Not all of these transcriptional/translational regulatory sequences need to be present, as long as replication, transcription, and translation of the selected coding sequence are possible in a suitable host cell. Those skilled in the art can easily identify a regulatory nucleic acid sequence from public information. Furthermore, those skilled in the art can identify a transcriptional/translational regulatory sequence that can be applied for use purposes, for example, in vivo, ex vivo, or in vitro.

[0173] As used herein, the term “promoter” refers to a segment of a nucleic acid sequence that controls transcription of an operably linked nucleic acid sequence. The promoter contains a specific sequence that is sufficient for recognition, binding, and transcription initiation by RNA polymerase. The promoter may contain a sequence that regulates recognition, binding, or transcription initiation by RNA polymerase.

[0174] As used herein, the term “enhancer” refers to a segment of a nucleic acid sequence that has the function of increasing the expression efficiency of a gene of interest. As used herein, the term “silencer” refers to a segment of a nucleic acid sequence that has the function of reducing the expression efficiency of a gene of interest, contrary to an enhancer.

[0175] As used herein, the term “insulator” refers to a segment of a nucleic acid sequence that has the function of cis-regulation, which regulates the expression of genes at distant locations on the sequence of DNA.

[0176] As used herein, the term “terminator” refers to a segment of a nucleic acid sequence that is located downstream of a region coding a protein and is involved in the termination of transcription when the nucleic acid is transcribed into mRNA.

[0177] As used herein, the term “origin of replication” refers to a segment of a nucleic acid sequence at which replication begins by partial unwinding of the DNA double helix when a protein (for example, initiator DnaA protein or the like) that recognizes the nucleic acid sequence binds or when RNA is synthesized.

[0178] As used herein, an internal ribosome entry site (“IRES”) refers to a nucleic acid segment that promotes entry or retention of ribosomes during translation of a nucleic acid sequence downstream thereof.

[0179] As used herein, the term “homology” of nucleic acids refers to a degree of identity of two or more nucleic acid sequences with respect to one another, and having “homology” generally refers to having a high degree of identity or similarity. Therefore, the identity or similarity of sequences is higher as homology of two nucleic acids is high. The “similarity” is a numerical value calculated for a similar base in addition to identity, and here, the similar base refers to a case where some of bases in a mixed base (for example, R=A+G, M=A+C, W=A+T, S=C+G, Y=C+T, K=G+T, H=A+T+C, B=G+T+C, D=G+A+T, V=A+C+G, N=A+C+G+T) are identical. Whether two types of nucleic acids have homology can be investigated by a direct comparison of sequences or by a hybridization method under stringent conditions. When two nucleic acid sequences are directly compared, the genes have homology when the nucleic acid sequences are typically at least 50% homology, preferably at least 70% homology, and more preferably at least 80%, 90%, 95%, 96%, 97%, 98%, or 99% homology.

[0180] Amino acids can be mentioned As used herein by either their commonly known three letter symbols or their one character symbols recommended by the IUPAC-IUB Biochemical Nomenclature Commission. Similarly, nucleotides can be mentioned by their commonly recognized one character codes. As used herein, a comparison of similarity, identity, and homology of an amino acid sequence and a base sequence is calculated by using a sequence analysis tool BLAST and default parameters. For example, identity can be searched using BLAST 2.10.1+ (published on Jun. 18, 2020) of the NCBI. As used herein, a value for identity generally refers to a value obtained when aligned under the default conditions using BLAST described above. However, when a higher value is obtained by changing a parameter, the highest value is set as the value of identity. In a case where identity is evaluated in a plurality of regions, the highest value in the plurality of regions is set as the value of identity. Similarity is a numerical value calculated by taking into consideration a similar amino acid in addition to identity.

[0181] As used herein, unless otherwise specified, it is understood that reference to a biological material (for example, a protein, a nucleic acid, or a gene) is also a reference to a variant of the biological material (for example, a variant having modification in an amino acid sequence) that performs a function similar to (but not to the same extent as) the biological function of the biological material. Such a variant can contain a fragment of the original molecule, and a molecule that is at least 30%, 40%, 50%, 60%, 70%, 80%, 90%, 95%, 98%, or 99% homology as compared to the sequence of the original molecule that is aligned over the amino acid sequence or nucleic acid sequence of the original biological material of the same size, or aligned by computer homology program known in the art. A variant can contain a molecule containing a modified amino acid (modification by, for example, disulfide bond formation, glycosylation, lipidation, acetylation, or phosphorylation) or a modified nucleotide (for example, modification by methylation).

[0182] As used herein, the term “stringent conditions” refers to well-known conditions commonly used in the art. As the stringent conditions, for example, the following conditions can be adopted. Incubation is performed at 37° C. overnight (1) using low ionic strength and high temperature for washing (for example, at 50° C., 0.015 M sodium chloride/0.0015 M sodium citrate/0.1% sodium dodecyl sulfate), (2) using a denaturant such as formamide during hybridization (for example, at 42° C., 50% (v/v) formamide and 0.1% bovine serum albumin/0.1% Ficoll/0.1% polyvinylpyrrolidone/50 mM sodium phosphate buffer with pH 6.5, and 750 mM sodium chloride, 75 mM sodium citrate), or (3) in a solution containing 20% formamide, 5×SSC, 50 mM sodium phosphate (pH 7.6), 5×Denhardt's solution, 10% dextran sulfate, and 20 mg/ml of denatured sheared salmon sperm DNA, and then the filter is washed at 1×SSC at about 37 to 50° C. Note that a formamide concentration may be 50% or more. A washing time may be 5, 15, 30, 60, or 120 minutes or longer. A plurality of factors such as a temperature and a salt concentration are considered as factors affecting the stringency of the hybridization reaction, and for details, reference can be made to Ausubel et al., Current Protocols in Molecular Biology, Wiley Interscience Publishers, (1995). Examples of “highly stringent conditions” are 0.0015 M sodium chloride, 0.0015 M sodium citrate, 65 to 68° C., or 0.015 M sodium chloride, 0.0015 M sodium citrate, and 50% formamide, 42° C. Hybridization can be performed according to the methods described in experimental textbooks such as Molecular Cloning 2nd ed., Current Protocols in Molecular Biology, Supplement 1-38, DNA Cloning 1: Core Techniques, A Practical Approach, Second Edition, Oxford University Press (1995). Here, a sequence including only the A sequence or only the T sequence is preferably excluded from a sequence that hybridizes under stringent conditions. Moderately stringent conditions can be readily determined by those skilled in the art, for example, based on DNA length, and are shown in Sambrook et al., Molecular Cloning: A Laboratory Manual, #3, Vol. 1, 7.42-7.45 Cold Spring Harbor Laboratory Press, 2001; and include, for nitrocellulose filters, the use of a pre-wash solution of 5×SSC, 0.5% SDS, and 1.0 mM EDTA (pH 8.0), hybridization conditions of about 50% formamide, 2×SSC-6×SSC (or other similar hybridization solution such as Stark's solution in about 50% formamide at about 42° C.) at about 40 to 50° C., and washing conditions of 0.5×SSC, 0.1% SDS at about 60° C. Accordingly, the polypeptide used in the present disclosure also includes a polypeptide encoded by a nucleic acid molecule that hybridizes under highly or moderately stringent conditions to the nucleic acid molecule encoding the polypeptide specifically described in the present disclosure.

[0183] As used herein, the term “corresponding” amino acid or nucleic acid refers to an amino acid or a nucleotide which has or is expected to have, in a certain polypeptide molecule or polynucleotide molecule, a similar action as a predetermined amino acid or nucleotide in a reference polypeptide or a polynucleotide for comparison, and, particularly in the case of enzyme molecules, refers to an amino acid which is present at a similar position in an active site and makes a similar contribution to catalytic activity. For example, for an antisense molecule, it can be a similar portion in an ortholog corresponding to a specific portion of the antisense molecule. A corresponding amino acid can be a specific amino acid subjected to, for example, cysteination, glutathionylation, S—S bond formation, oxidation (for example, oxidation of a methionine side chain), formylation, acetylation, phosphorylation, glycosylation, myristylation, or the like. Alternatively, a corresponding amino acid can be an amino acid responsible for dimerization. Such a “corresponding” amino acid or nucleic acid may be a region or a domain over a certain range. Accordingly, it is referred As used herein as a “corresponding” region or domain in such a case.

[0184] As used herein, the term “corresponding” gene (for example, a polynucleotide sequence or molecule) refers to a gene (for example, a polynucleotide sequence or molecule) in a certain species which has or is expected to have a similar action as a predetermined gene in a reference species for comparison. When a plurality of genes having such an action are present, the corresponding gene refers to a gene having the same evolutionary origin. Accordingly, a gene corresponding to a certain gene can be an ortholog of such a gene. For example, the cap of serotype 1 AAV can correspond to cap of serotype 2 AAV. For example, a corresponding gene in a certain virus can be found by search on a sequence database for the virus using a gene sequence of the virus serving as a reference of the corresponding gene as a query sequence.

[0185] In accordance with the present disclosure, the term “activity” refers to a function of a molecule in the broadest sense As used herein. Activity, although not intended to be limiting, generally includes a biological function, biochemical function, physical function, and chemical function of a molecule. Examples of the activity include enzymatic activity, an ability to interact with another molecule, an ability to activate, promote, stabilize, inhibit, suppress, or destabilize a function of another molecule, stability, and an ability to localize at a specific position in a cell. When applicable, the term also relates to a function of a protein complex in the broadest sense.

[0186] As used herein, when referring to a certain gene or a nucleic acid molecule or a polypeptide related thereto, the term “biological function” refers to a specific function that the gene, the nucleic acid molecule, or the polypeptide can have in a living body. Examples of the biological function include, but are not limited to, ability to recognize a specific cell surface structure, enzymatic activity, and ability to bind to a specific protein. In the present disclosure, examples of the biological function include, but are not limited to, a function in which a certain promoter is recognized in a specific host cell. As used herein, the biological function can be exerted by “biological activity”. As used herein, the term “biological activity” refers to an activity that a certain agent (for example, a polynucleotide, a protein, or the like) can have in a living body. Biological activity encompasses an activity of exerting a variety of functions (for example, transcription promoting activity), and also encompasses, for example, an activity of activating or inactivating another molecule by an interaction with a certain molecule. For example, when a certain factor is an enzyme, the biological activity thereof encompasses enzyme activity thereof. In another example, in a case where a certain factor is a ligand, binding to a receptor corresponding to the ligand is encompassed. Such biological activity can be measured by a technique that is well known in the art. Accordingly, the term “activity” refers to a variety of measurable indicators indicating or revealing binding (either direct or indirect); and affecting a response (that is, having a measurable effect in response to some exposure or stimulus), including, for example, the amount of upstream or downstream protein in a host cell or a measure of other similar functions.

[0187] As used in the present disclosure, the term “infectivity” of a virus or virus-derived construct refers to the ability to introduce a nucleic acid within the virus or virus-derived construct into a cell by adhesion or membrane fusion of the virus or virus-derived construct to the cell. The term “replicative ability” of a virus or virus-derived construct refers to the ability to produce infectious viral particles or virus-derived construct particles within an infected cell.

[0188] As used herein, the terms “transformation”, “transduction”, and “transfection” are used interchangeably, unless otherwise stated, and refer to the introduction of a nucleic acid into a host cell (as necessary, via a virus or virus-derived construct). As the transformation method, any method can be used as long as it is a method of introducing a nucleic acid into a host cell, and examples thereof include various well-known techniques such as the use of competent cells, an electroporation method, a method using a particle gun (gene gun), and a calcium phosphate method.

[0189] As used herein, the term “purified” substance or biological agent (for example, a nucleic acid, a protein, or the like) refers to a substance or a biological agent in which at least a portion of a agent naturally accompanying the biological agent is removed. Thus, the purity of the biological agent in the purified biological agent is generally higher than the purity in the normal state of the biological agent (that is, concentrated). The term “purified” As used herein refers to the presence of preferably at least 75% by weight, more preferably at least 85% by weight, still more preferably at least 95% by weight, and most preferably at least 98% by weight of a biological agent of the same type. The substance used in the present disclosure is preferably a “purified” substance.

[0190] As used herein, the term “pharmaceutical ingredient” means an optional ingredient that can constitute a medicine, and examples thereof include an active ingredient (which itself exhibits drug efficacy) and an additional ingredient (ingredient which itself is not expected to exhibit drug efficacy, but is expected to play a certain role (for example, an excipient, a lubricant, a surfactant, or the like) when contained as a medicine). The pharmaceutical ingredient may be a single substance or a combination of a plurality of substances and agents. Any combination such as a combination of an active ingredient and an additive ingredient or a combination of an adjuvant and an active ingredient can also be included.

[0191] As used herein, the term “active ingredient” refers to an ingredient that exerts an intended medicinal effect, and can correspond to one or a plurality of ingredients.

[0192] As used herein, the term “additional ingredient” refers to an optional ingredient that is not expected to have a medicinal effect but plays a certain role when contained as a medicine, and examples of the additional ingredient include a pharmaceutically acceptable carrier, a stabilizer, an adjuvant, a solubility improving agent, a solubilizing agent, a diluent, an excipient, a buffer, a binder, a diluent, a flavoring agent, and a lubricant.

[0193] As used herein, an “agent” is used in a broad sense, and may be any substance or other elements (for example, energy such as light, radioactivity, heat, and electricity) as long as the intended object can be achieved. Examples of such a substance include, but are not limited to, a protein, a polypeptide, an oligopeptide, a peptide, a polynucleotide, an oligonucleotide, a nucleotide, a nucleic acid (including, for example, DNA such as cDNA or genomic DNA, RNA such as mRNA), a polysaccharide, an oligosaccharide, a lipid, an organic small molecule (for example, a hormone, a ligand, an information transmitting substance, an organic small molecule, a molecule synthesized by combinatorial chemistry, a small molecule that can be used as a medicine (for example, a small molecule ligand or the like), or the like), a composite molecule thereof, and a mixture thereof.

[0194] As used herein, the term “complex” or “complex molecule” means any construct having two or more portions. For example, when one portion is a polypeptide, the other portion may be a polypeptide or a substance other than the polypeptide (for example, a substrate, a sugar, a lipid, a nucleic acid, other hydrocarbons, or the like). As used herein, two or more portions constituting the complex may be bonded by a covalent bond or may be bonded by other bonds (for example, a hydrogen bond, an ionic bond, a hydrophobic interaction, van der Waals force, and the like).

[0195] As used herein, the term “label” refers to the presence (for example, a substance, energy, an electromagnetic wave, and the like) for identifying a molecule or substance to be targeted from others. Examples of such a labeling method include a radioisotope (RI) method, a fluorescence method, a biotin method, and a chemiluminescence method. When a plurality of target proteins or agents or means for capturing the target proteins are labeled by a fluorescence method, the target proteins are labeled with fluorescent substances having different maximum fluorescence emission wavelengths. A difference in maximum fluorescence emission wavelength is preferably 10 nm or more. Any label that does not affect the function can be used, and examples of the fluorescent substance include Alexa™ Fluor. Alexa™ Fluor is a water-soluble fluorescent dye obtained by modifying coumarin, rhodamine, fluorescein, cyanine, or the like, is a series corresponding to a wide range of fluorescence wavelengths, and is significantly stable, bright, and less pH sensitive as compared with other fluorescent dyes having corresponding wavelengths. Examples of a combination of fluorescent dyes having a maximum fluorescence wavelength of 10 nm or more include a combination of Alexa™ 555 and Alexa™ 633 and a combination of Alexa™ 488 and Alexa™ 555. Examples of other fluorescent labels include a cyanine dye (for example, Cy3 and Cy5 of CyDye™ series and the like), a rhodamine 6G reagent, N-acetoxy-N2-acetylaminofluorene (AAF), and AAIF (iodine derivative of AAF). In the present disclosure, such a label can be utilized to modify the object to be targeted so that the object can be detected by detection means used. Such modifications are known in the art and those skilled in the art can carry out such methods as appropriate for the label and depending on the object to be targeted.

[0196] As used herein, the term “kit” refers to a unit generally providing portions to be provided (for example, a virus-derived construct, a manual, and the like) that are usually divided into two or more sections. The form of the kit is preferred when it is intended to provide a composition that should not be provided in a mixed state for stability or the like, but is preferably mixed immediately before use. Such a kit preferably includes an instruction or manual describing how to use the provided portions or how a reagent should be processed. When the kit is used As used herein as a reagent kit, the kit generally includes an instruction or the like describing how to use a virus-derived construct and the like.

[0197] As used herein, the term “instruction” is a document with an explanation of the method of use of the present disclosure for a physician or other users. The instruction has a description of administration of the medicine of the present disclosure and the like. In addition, the instruction may include instruction of the administration form. The instruction is prepared in accordance with a format defined by the regulatory agency of the country wherein the present disclosure is practiced (for example, the Ministry of Health, Labor and Welfare in Japan, Food and Drug Administration (FDA) in the United States or the like), with an explicit description showing approval by the regulatory agency. The instruction is a so-called package insert and is usually provided in, but is not limited to, a paper medium. For example, the instruction can also be provided in a form such as an electronic medium (for example, a web site or an e-mail provided on the Internet).

[0198] The term “about” refers to the indicated value plus or minus 10%. “About” when used for temperature refers to the indicated temperature plus or minus 5° C., and “about” when used for pH refers to the indicated pH plus or minus 0.5.

### PREFERRED EMBODIMENTS

[0199] Preferred embodiments of the present disclosure will be described below. It is understood that the embodiments provided below are provided for a better understanding of the present disclosure, and that the scope of the present disclosure should not be limited to the following description. Therefore, it is apparent that those skilled in the art can appropriately make modifications within the scope of the present disclosure in view of the description As used herein. It is also understood that the following embodiments may be used alone or in combination.

### (Production of Virus-Derived Construct Plasmids)

[0200] In one aspect, the present disclosure provides a method for producing various virus-derived construct plasmids from starting plasmids (for example, virus-derived construct plasmids of the present disclosure). In one embodiment, a method for producing virus-derived construct plasmids of the present disclosure includes a step of preparing a set of starting plasmids containing at least of a part of nucleic acid sequences required to construct a virus-derived construct, the set of starting plasmids including a set of corresponding alternative unit nucleic acids, and the set of corresponding alternative unit nucleic acids including at least one set of corresponding alternative unit nucleic acids containing different nucleic acid sequences; a step of treating the set of starting plasmids with a restriction enzyme and preparing a mixed solution containing cleaved alternative unit nucleic acid fragments; a step of ligating the cleaved alternative unit nucleic acid fragments to form an integrated nucleic acid; and a step of bringing the integrated nucleic acid into contact with a transformed organism to form virus-derived construct plasmids. When the starting plasmid contains a plurality of unit nucleic acids, the unit nucleic acid fragments generated by the restriction enzyme treatment of the starting plasmid are almost equimolar, and an integrated nucleic acid that can be efficiently incorporated by the transformed organism without requiring complicated adjustment of the number of moles of the unit nucleic acid fragments can be produced. In addition, as the set of starting plasmids includes a set of corresponding alternative unit nucleic acids containing different nucleic acid sequences, alternative unit nucleic acids incorporated at particular positions in the product plasmid are randomly selected from the set of corresponding alternative unit nucleic acids, and thus, virus-derived construct plasmids having new structures are easily obtained, and in a case where a plurality of sets of corresponding alternative unit nucleic acids containing different nucleic acid sequences are present, a structural variation of the virus-derived construct plasmids produced increases synergistically. In one embodiment, in a method for producing virus-derived construct plasmids of the present disclosure, a set of corresponding alternative unit nucleic acids includes a plurality of sets of corresponding alternative unit nucleic acids containing different nucleic acid sequences to provide 16 or more, 27 or more, 32 or more, 64 or more, 81 or more, 128 or more, 243 or more, 256 or more, 512 or more, 729 or more, 1,024 or more possible combinations of different parallel alternative unit nucleic acids.

[0201] In one embodiment, the method for producing virus-derived construct plasmids of the present disclosure produces a population of virus-derived construct plasmids. In one embodiment, in the method for producing virus-derived construct plasmids of the present disclosure, at least one of the sets of starting plasmids contains a transcriptional start sequence that functions in animal cells, and virus-derived construct plasmids containing the transcriptional start sequence that functions in animal cells are produced. In one embodiment, in the method for producing virus-derived construct plasmids of the present disclosure, three or more types of starting plasmids are used. In one embodiment, in the method for producing virus-derived construct plasmids of the present disclosure, the set of corresponding alternative unit nucleic acids includes at least two sets of corresponding alternative unit nucleic acids containing different nucleic acid sequences. The virus-derived construct plasmids produced by the method for producing virus-derived construct plasmids of the present disclosure can be used as starting plasmids and subjected to the next round of the method for producing virus-derived construct plasmids of the present disclosure.

[0202] In one embodiment, the method for producing virus-derived construct plasmids of the present disclosure further includes a step of selecting a virus-derived construct plasmid having an excellent desired function from a population of the formed virus-derived construct plasmids. Examples of the desired function as the selection criterion include the amount of virus-derived construct produced per plasmid, the amount of virus-derived construct produced per producer cell, the amount of impurities generated when the virus-derived construct is produced from the plasmid, and the purity of a target virus-derived construct when the virus-derived construct is produced from the plasmid. Examples of the impurities include a coat protein that does not contain a nucleic acid sequence, a coat protein that contains an incomplete nucleic acid sequence, an incomplete coat protein, an incomplete nucleic acid sequence, and a virus having self-replication ability (including a wild-type virus-like nucleic acid sequence generated by genetic recombination during the production process) (can be determined to be incomplete by having a structure different from that of the complete nucleic acid or protein expected from the nucleic acid sequence of the virus-derived construct plasmid, such as introduction mutations and cleavage). In one embodiment, the method for producing virus-derived construct plasmids of the present disclosure can include adding a barcode nucleic acid in the step of ligating to form the integrated nucleic acid, which can facilitate distinguishing the formed virus-derived construct plasmids.

[0203] In one embodiment, the method for producing virus-derived construct plasmids of the present disclosure can be performed to improve a partial structure of the virus-derived construct plasmid. In one embodiment, the improvement can be performed by preparing virus-derived construct plasmids containing a combination of parallel alternative unit nucleic acids of the virus-derived construct plasmids selected in the above step of virus-derived construct plasmids having an excellent desired function. For example, when virus-derived construct plasmids having an excellent desired function are found, a combination of elements on the plasmid can be considered preferable for the desired function. Therefore, a structure similar to the combination of elements may be formed on another plasmid with reference to nucleic acid sequence information of the plasmid or generated amino acid sequence information of the plasmid, or a specific region may be cut out from the plasmid and transplanted into another plasmid. In this case, it is not necessary to prepare and examine a virus-derived construct plasmid containing the entire nucleic acid sequence required to construct a virus-derived construct, and the method for producing virus-derived construct plasmids of the present disclosure can be performed in order to prepare a variation of a partial structure to be examined for improvement in the virus-derived construct plasmid.

[0204] In one embodiment, in the method for producing virus-derived construct plasmids of the present disclosure, examples of the elements for examining a structural variation include (A) a nucleic acid sequence including a terminal repeat, (B) a nucleic acid sequence encoding a packaging factor, (C) a nucleic acid sequence encoding a structural protein, (D) a nucleic acid sequence encoding a functional cofactor, (E) a nucleic acid sequence encoding a promoter, (F) a nucleic acid sequence encoding a desired gene, and (G) a nucleic acid sequence involved in host cell biosynthesis. The inclusion of variants (different serotypes, variants, different promoters that function in the same host cell, and the like) of these elements (or individual genes corresponding to the elements) in the set of corresponding alternative unit nucleic acids can facilitate the design of virus-derived construct plasmids having an excellent desired function. Those skilled in the art can appropriately determine the elements to be contained in the alternative unit nucleic acids according to the matter to be considered. For example, when an appropriate combination of a promoter and a desired gene is considered, the method for producing virus-derived construct plasmids of the present disclosure can be performed by preparing a set of corresponding alternative unit nucleic acids containing different promoter sequences, and preparing a set of corresponding alternative unit nucleic acids containing sequences of different desired genes as adjacent alternative unit nucleic acids. Subsequently, a preferred combination of a promoter, a desired gene, and an ITR can be examined by performing the method for producing virus-derived construct plasmids of the present disclosure by selecting a plurality of combinations of a promoter and a desired gene having relatively excellent performance, preparing a set of corresponding alternative unit nucleic acids as unit nucleic acids simultaneously containing the combination of the promoter and the desired gene, and performing a combination with a set of corresponding alternative unit nucleic acids containing different ITR sequences. The method for producing virus-derived construct plasmids of the present disclosure may also be performed by preparing three sets of corresponding alternative unit nucleic acids containing different promoter sequences, sequences of different desired genes, or different ITR sequences. In one embodiment, in the method for producing virus-derived construct plasmids of the present disclosure, the set of corresponding alternative unit nucleic acids includes a set of corresponding alternative unit nucleic acids containing different nucleic acid sequences encoding a desired gene, and a set of corresponding alternative unit nucleic acids that are located adjacently upstream thereof and contain different nucleic acid sequences encoding a promoter.

[0205] In one embodiment, the present disclosure provides a method for producing virus-derived construct plasmids of the present disclosure, the method including producing adeno-associated virus-derived construct plasmids in Bacillus subtilis, virus-derived construct plasmids produced by such a method, and a virus-derived construct. A virus-derived gene is often difficult to replicate by a host cell due to generation of mutation, inhibition of proliferation to the host cell, or the like. In particular, ITRs contained in AAV are likely to be mutated in Escherichia coli, making replication difficult. In addition, even with current techniques, replication of virus-derived construct plasmids is not readily achievable in any host cell. It is not easy to form and replicate the virus-derived construct plasmids by changing the host to Bacillus subtilis while various efforts are made in the replication of the virus-derived construct plasmids by Escherichia coli. Formation and production of virus-derived construct plasmids in Bacillus subtilis was enabled for the first time through the experiments of the present disclosure.

### (OGAB Method)

[0206] In one embodiment, the virus-derived construct plasmids of the present disclosure and/or a library thereof can be produced by the OGAB method. The Ordered Gene Assembly in Bacillus subtilis (OGAB) method is a method of incorporating an integrated nucleic acid into a transformed organism to produce circular plasmids in the organism. In the OGAB method, plasmids containing large sized nucleic acids can be conveniently prepared. The unit nucleic acid used for preparing the integrated nucleic acid may be prepared as a unit vector as described in details below (mainly for construction of novel plasmids), or may be prepared by cleaving the constructed plasmids. Hereinafter, a procedure for producing an integrated nucleic acid to be incorporated into a transformed organism will be described.

### Preparation of Unit Nucleic Acids

[0207] A unit nucleic acid for incorporation into an integrated nucleic acid is prepared. The following is a description mainly for construction of a novel plasmid. The unit nucleic acid can be produced by any known method, for example, by polymerase chain reaction (PCR) or chemical synthesis. The unit nucleic acid can contain any desired sequence, such as a sequence encoding a desired protein (a therapeutic protein, a protein constituting a virus-derived construct, or the like) or a portion thereof, a sequence controlling a gene (a promoter, an enhancer, or the like), or a sequence for manipulating a nucleic acid (a restriction enzyme recognition sequence or the like). The ends of each unit nucleic acid can be configured to produce a specific protruding sequence so that a plurality of types of unit nucleic acids are aligned in a particular order and/or specific direction when incorporated into an integrated nucleic acid. One or a plurality of unit nucleic acids can be designed to encode one or a plurality of genes having a long base length, as a large number of unit nucleic acids can eventually be integrated on the plasmid. Examples of the gene having a long base length include a group of genes constituting a series of metabolic pathways.

### Preparation of Unit Vector

[0208] A unit vector can be prepared by linking a unit nucleic acid and an additional nucleic acid different from the unit nucleic acid. The use of the unit vector can allow for easier handling of unit nucleic acids.

[0209] The additional nucleic acid may be a linear nucleic acid or a circular plasmid. In a case where a circular plasmid is used as an additional nucleic acid, a unit vector can also have a circular structure, and thus can be used for transformation of Escherichia coli and the like, for example. In one embodiment, the additional nucleic acid can contain a replication origin so that the unit vector is replicated in the introduced host. In one embodiment, all the unit nucleic acids for constructing an integrated nucleic acid can be linked to the same type of additional nucleic acid, thereby reducing a difference in size between the unit vectors and facilitating the handling of the plurality of types of unit vectors. In one embodiment, a unit nucleic acid for constructing an integrated nucleic acid may be linked to different types of additional nucleic acids. In one embodiment, for one or a plurality of unit nucleic acids for constructing an integrated nucleic acid, a ratio of (base length of unit nucleic acid)/(base length of unit vector) or an average thereof can be 50% or less, 40% or less, 30% or less, 20% or less, 15% or less, 10% or less, 7% or less, 5% or less, 2% or less, 1.5% or less, 1% or less, or 0.5% or less. As the size of the additional nucleic acid is larger than that of the unit nucleic acid, more uniform handling of different types of unit vectors can be possible. The linking between the unit nucleic acid and the additional nucleic acid can be performed by any method such as ligation using the DNA ligase or TA cloning method. In one embodiment, for one or the plurality of unit nucleic acids for constructing an integrated nucleic acid, the ratio of (base length of unit nucleic acid)/(base length of unit vector) or the average thereof can be 1% or more, 0.3% or more, 0.1% or more, 0.03% or more, 0.01% or more, 0.003% or more, or 0.001% or more, and the manipulation of the unit vector can be facilitated.

[0210] In one embodiment, the length of the unit nucleic acid can be 10 bp or more, 20 bp or more, 50 bp or more, 70 bp or more, 100 bp or more, 200 bp or more, 500 bp or more, 700 bp or more, 1,000 bp or more, or 1,500 bp or more, and 5,000 bp or less, 5,000 bp or less, 2,000 bp or less, 1,500 bp or less, 1,200 bp or less, 1,000 bp or less, 700 bp or less, or 500 bp or less.

[0211] In one embodiment, the integrated nucleic acid can be constructed from 2 kinds or more, 4 kinds or more, 6 kinds or more, 8 kinds or more, 10 kinds or more, 15 kinds or more, 20 kinds or more, 30 kinds or more, 40 kinds or more, 50 kinds or more, 60 kinds or more, 70 kinds or more, 80 kinds or more, 90 kinds or more, kinds or 100 kinds or more, and 1,000 kinds or less, 700 kinds or less, 500 kinds or less, 200 kinds or less, 120 kinds or less, 100 kinds or less, 80 kinds or less, 70 kinds or less, 60 kinds or less, 70 kinds or less, kinds or 50 kinds or less unit nucleic acids. By adjusting the numbers of moles of the respective unit nucleic acids (kinds or unit vectors) to be substantially the same, a desired integrated nucleic acid having a tandem repeat-like structure can be efficiently produced.

[0212] In one embodiment, the unit nucleic acid may have a base length obtained by approximately equally dividing a set of repetitive sequences in the integrated nucleic acid by the number of unit nucleic acids. This can facilitate a manipulation of aligning the numbers of moles of the respective unit nucleic acids (or unit vectors). In one embodiment, the unit nucleic acid can have an increased or decreased base length of 30% or less, 25% or less, 20% or less, 15% or less, 10% or less, 7% or less, or 5% or less from a base length obtained by approximately equally dividing a set of repetitive sequences in the integrated nucleic acid by the number of unit nucleic acids.

[0213] In one embodiment, the unit nucleic acid can be designed to have a non-palindromic sequence (a sequence that is not a palindromic sequence) at the end of the unit nucleic acid. The unit nucleic acid designed as described above can easily provide a structure in which the unit nucleic acids are linked to each other while maintaining the order in the integrated nucleic acid when the non-palindromic sequence is made into a protruding sequence.

### Production of Integrated Nucleic Acid

[0214] The integrated nucleic acid can be constructed by linking the unit nucleic acids to each other. In a case where a plurality of unit nucleic acids are present on the same starting plasmid, an integrated nucleic acid can be constructed by cleaving the starting plasmid to produce unit nucleic acid fragments and linking the unit nucleic acid fragments to each other. In one embodiment, the unit nucleic acid can be prepared by being cut out from the unit vector by a restriction enzyme or the like. An integrated nucleic acid can contain 1 or more, 2 or more, 3 or more, 4 or more, 5 or more, 6 or more, 7 or more, 8 or more, 9 or more, or 10 or more sets of repetitive sequences. The repetitive sequence in the integrated nucleic acid can include a sequence of a unit nucleic acid, and as necessary, a sequence of an integrated vector nucleic acid. The integrated nucleic acid can contain a sequence that enables replication of the nucleic acid in a transformed organism. In one embodiment, a sequence that enables replication of the nucleic acid in a transformed organism can contain a replication origin effective in the transformed organism (for example, Bacillus bacteria (Bacillus subtilis)). The sequence of the replication origin effective in Bacillus subtilis is not particularly limited, and examples of a sequence having a 0-type replication mechanism include a sequence of an origin of replication contained in plasmids such as pTB19 (Imanaka, T., et al. J. Gen. Microbioi. 130, 1399-1408 (1984)) or pLS32 (Tanaka, T and Ogra, M. FEBS Lett. 422, 243-246 (1998)), and pAMB1 (Swinfield, T. J., et al. Gene 87, 79-90 (1990)).

[0215] The integrated nucleic acid may contain an additional base sequence as necessary in addition to the unit nucleic acid. In one embodiment, the integrated nucleic acid may contain a base sequence that controls transcription translation, such as a promoter, an operator, an activator, or a terminator. Specific examples of the promoter in the case of using Bacillus subtilis as a host include Pspac (Yansura, D. and Henner, D. J. Pro. Natl. Acad. Sci, USA 81, 439-443 (1984.)) and Pr promoter (Itaya, M. Biosci. Biotechnol. Biochem. 63, 602-604 (1999)), which can be regulated in expression by isopropyl s-D-thiogalactopyranoside (IPTG).

[0216] The unit nucleic acid can form a repetitive structure that maintains a certain order and direction in the integrated nucleic acid. In one embodiment, the unit nucleic acid is constructed so that the base sequences at the protruding ends of the unit nucleic acid cut out from the unit vector are complementary to each other, such that it is possible to form a repetitive structure in which a certain order and direction in the integrated nucleic acid are maintained. In one embodiment, by making the structure of the protruding end unique for each different unit nucleic acid, it is possible to efficiently form a repetitive structure maintaining a certain order and direction. In one embodiment, the protruding end may contain a non-palindromic sequence and may be either a 5′ end protruding or a 3′ end protruding.

[0217] In one embodiment, a unit nucleic acid having a protruding end can be cut out from a unit vector using a restriction enzyme. In the embodiment, the unit vector can contain one or a plurality of restriction enzyme recognition sequences. In a case where the unit vector contains a plurality of restriction enzyme recognition sequences, the respective restriction enzyme recognition sequences may be recognized by the same restriction enzyme or may be recognized by different restriction enzymes. In one embodiment, the unit vector can contain a pair of regions recognized by the same restriction enzyme so that a complete unit nucleic acid region is included between these regions. The restriction enzymes used are not particularly limited, Type IIS restriction enzymes such as AarI, BbsI, BbvI, BcoDI, BfuAI, BsaI, BsaXI, BsmAI, BsmBI, BsmFI, BspMI, BspQI, BtgZI, FokI, and SfaNI can be used, and these restriction enzymes can create a protruding end at a site away from the recognition sequence outside the recognition sequence by a certain distance. When (for example, single) Type IIS restriction enzyme is used, the sequences of the protruding ends of the cut unit nucleic acid can be different for each unit nucleic acid, which can be advantageous for assembling a plurality of unit nucleic acids in a certain order and direction. In one embodiment using Type IIS restriction enzyme, the unit vector does not contain a region recognized by Type IIS restriction enzyme in the unit nucleic acid region. In an embodiment using a restriction enzyme that cleaves the recognition region, the unit vector can contain a region recognized by the restriction enzyme at the end of the unit nucleic acid region.

[0218] In one embodiment, when the same type of restriction enzyme is used to cut out the unit nucleic acid from a plurality of unit vectors, the restriction enzyme treatment can be performed in a solution containing the plurality of unit vectors, and the efficiency of the operation can be improved. The types of restriction enzymes used to produce a certain integrated nucleic acid can be, for example, 5 or less, 4 or less, 3 or less, 2 or less, or 1, and the use of a small number of restriction enzymes can reduce variations in the number of moles between the unit nucleic acids. In one embodiment, the unit nucleic acid cut out from the unit vector can be readily purified by any known fractionation method such as agarose gel electrophoresis.

[0219] The unit nucleic acid, and as necessary, the integrated vector nucleic acids can be linked (ligated) to each other using DNA ligase or the like. Accordingly, an integrated nucleic acid can be produced. For example, the linking of the unit nucleic acids, and as necessary, the integrated vector nucleic acids can be performed in the presence of components such as polyethylene glycol (for example, PEG2000, PEG4000, PEG6000, PEG8000, and the like) and salts (for example, monovalent alkali metal, sodium chloride, and the like). A concentration of each unit nucleic acid in a ligation reaction solution is not particularly limited, and can be 1 fmol/μl or more. A reaction temperature and time of the ligation are not particularly limited, and are, for example, 37° C. and 30 minutes or longer. In one embodiment, before linking the unit nucleic acid, and as necessary, the integrated vector nucleic acid, a composition containing the unit nucleic acid, and as necessary, the integrated vector nucleic acid may be subjected to any conditions for inactivating the restriction enzyme (for example, phenol/chloroform treatment).

[0220] The unit nucleic acid can be adjusted to about the same number of moles using the method described in WO 2015/111248 A or the like. In a case where a plurality of unit nucleic acids are present on the same starting plasmid, fragments of the (parallel) unit nucleic acids generated by cleaving the starting plasmid are adjusted to the same number of moles as in nature. The total number of moles of the set of (parallel) alternative unit nucleic acids generated by mixing and cleaving a plurality of starting plasmids is adjusted to the same as in nature. By adjusting the unit nucleic acids to approximately the same number of moles, a desired integrated nucleic acid having a tandem repeat-like structure can be efficiently produced. The number of moles of the unit nucleic acid can be adjusted by measuring the concentration of the unit vector or the unit nucleic acid.

Production of Plasmids from an Integrated Nucleic Acid(s)

[0221] Plasmids can be formed in a transformed organism by bringing an integrated nucleic acid into contact with the transformed organism. In one embodiment, examples of the transformed organism include bacteria belonging to the genus Bacillus, bacteria belonging to the genus Streptococcus, bacteria belonging to the genus Haemophilus, and bacteria belonging to the genus Neisseria. Examples of the bacteria belonging to the genus Bacillus include B. subtilis (Bacillus subtilis), B. megaterium (Bacillus megaterium), and B. stearothermophilus (Bacillus stearothermophilus). In a preferred embodiment, the transformed organism is Bacillus subtilis. In one embodiment, the transformed organism that incorporates the integrated nucleic acid is in a competent state and can actively incorporate a nucleic acid. The term “competent” refers to a state in which a cell becomes more permeable to exogenous substances (for example, nucleic acids). For example, Bacillus subtilis in a competent state cleaves a double-stranded nucleic acid as a substrate on a cell, decomposes any one strand of the double-stranded nucleic acid from the cleavage point, and incorporates the other single strand into a bacterial cell. The incorporated single strand can be repaired into a circular double-stranded nucleic acid in the bacterial cell. Any known method can be used to render the transformed organism competent, and for example, Bacillus subtilis can be rendered competent using the method described in Anagnostopoulou, C. and Spizen, J. J. Bacteriol., 81, 741-746 (1961). As a method of transformation, a known method suitable for each transformed organism can be used.

### (Elements of Virus-Derived Construct Plasmids)

[0222] In one aspect, the present disclosure provides virus-derived construct plasmids. Although elements of the virus-derived construct plasmids are described below, any element or combination of elements can be contained in alternative unit nucleic acids to perform a method for producing virus-derived construct plasmids of the present disclosure The elements of the virus-derived construct plasmids described below are applied to both the starting plasmid and the product plasmid. In addition, the elements of the virus-derived construct plasmids described below are also applied to a virus-derived construct plasmid library of the present disclosure.

[0223] In one embodiment, the present disclosure provides a plasmid containing at least of a part of nucleic acid sequences required to construct a virus-derived construct in an operably linked form. In one embodiment, the nucleic acid sequence required to construct a virus-derived construct includes (A) a nucleic acid sequence including a terminal repeat (for example, derived from any of serotypes 1 to 12 or variants thereof), (B) a nucleic acid sequence encoding a packaging factor (for example, rep, which can be derived from any of adeno-associated virus serotypes 1 to 12 or variants thereof), (C) a nucleic acid sequence encoding a structural protein (for example, cap, which can be derived from any of adeno-associated virus serotypes 1 to 12 or variants thereof), and (D) a nucleic acid sequence encoding a functional cofactor (for example, at least one of E1A, E1B, E2A, E4, and VA, which can be derived from any of adenovirus serotypes 1 to 52 or variants thereof). In one embodiment, the virus-derived construct plasmid of the present disclosure contains 2, 3, or 4 of the nucleic acid sequences of (A) to (D). In one embodiment, the nucleic acid sequence required to constitute a virus is located in a continuous region on the virus-derived construct plasmid. A virus-derived construct plasmid having such a structure can be formed by incorporating nucleic acid fragments containing a nucleic acid sequence required to constitute a virus into an original plasmid. In one embodiment, the nucleic acid sequence required to constitute a virus is present in a continuous region having a base length of about 50% or less, about 40% or less, about 30% or less, about 25% or less, about 20% or less, about 15% or less, about 10% or less, or about 5% or less of the total base length of the virus-derived construct plasmids. In one embodiment, elements other than the terminal repeat of the nucleic acid sequence required to constitute a virus (for example, one or a plurality of a nucleic acid sequence encoding a structural protein of a virus, a nucleic acid sequence encoding a packaging factor, and a functional cofactor) may each be located between or outside two terminal repeats. In the virus-derived construct plasmids of the present disclosure, the elements of the nucleic acid sequence required to constitute a virus may be arranged in any order and position, and it is understood that various arrangements other than the arrangements specifically shown in the drawings and the like can be used. In a case where the nucleic acid sequence described in a specific function such as a functional cofactor contains a plurality of elements, the order and position of each element in the virus-derived construct plasmid can be arbitrary, unless otherwise specified, and arbitrary elements (for example, VA, E2A, and E4) can be arranged in succession (without sandwiching other genes therebetween). As the functional cofactor, a gene or a combination of genes derived from a virus different from the origin virus of the virus-derived construct plasmid such as an adenovirus, a herpes virus, a papilloma virus, a bocavirus, and a simian virus may be used. In one embodiment, examples of the functional cofactor include adenoviruses E1A, E1B, E2A, E4, and VA, herpes viruses UL5, UL8, UL30, UL42, UL52, ICP0, ICP4, ICP8, and ICP22, papilloma viruses E1, E2, and E6, bocaviruses NP1, NS2, NS4, and BocaSR, and simian virus Large T antigen.

[0224] In one embodiment, the nucleic acid sequence required to constitute a virus contains two terminal repeats of the virus, and a base length of a region sandwiched between the two terminal repeats (excluding the terminal repeats themselves) can be about 1 kb or more, about 5 kb or more, about 10 kb or more, about 20 kb or more, about 30 kb or more, about 40 kb or more, about 50 kb or more, about 70 kb or more, or about 100 kb or more. In one embodiment, the nucleic acid sequence required to constitute a virus contains two terminal repeats of the virus and another portion, and the another portion is located outside the region sandwiched between the two terminal repeats. In one embodiment, the virus-derived construct plasmid of the present disclosure contains a promoter, a desired gene, and a terminator from upstream between a 5′ ITR and a 3′ ITR. In particular, it is intended that the nucleic acid sequence encoding a structural protein of a virus may be a variant of a wild-type sequence (for example, adeno-associated virus serotypes 1 to 12).

[0225] In one embodiment, the virus-derived construct plasmid of the present disclosure contains a promoter upstream of the element, as necessary. For example, the virus-derived construct plasmids of the present disclosure may contain a promoter upstream of one or a plurality of the nucleic acid sequences of (B), (C), and (D) or the genes contained therein of the nucleic acid sequences required to construct a virus-derived construct. For example, the virus-derived construct plasmids of the present disclosure may contain a promoter upstream of one or a plurality of desired genes. In one embodiment, the virus-derived construct plasmid of the present disclosure contains a drug-selectable marker nucleic acid sequence between any two of the nucleic acid sequences of (A) to (D). In one embodiment, the virus-derived construct plasmid of the present disclosure contains a drug-selectable marker nucleic acid sequence between any two genes encoded by the nucleic acid sequences of (A) to (D). In one embodiment, a set of alternative unit nucleic acids encoding a promoter includes a set of corresponding alternative unit nucleic acids encoding promoters whose types or directions are different. In one embodiment, the promoter includes a drug-responsive promoter.

[0226] In one embodiment, the virus-derived construct plasmids of the present disclosure are used to produce a viral vector, a virus-like particle (VLP), an oncolytic virus (including a virus modified to proliferate only in cancer cells), or a viral replicon (self-replicating viral genome lacking the ability to produce viral particles).

[0227] In one embodiment, the virus-derived construct plasmid of the present disclosure contains a nucleic acid sequence that promotes plasmid replication in a microbial host cell. In one embodiment, a nucleic acid sequence that promotes plasmid replication in Bacillus subtilis can contain an origin of replication that operates in Bacillus subtilis, and an origin of replication contained in plasmids such as oriC, pTB19 (Imanaka, T., et al. J. Gen. Microbioi. 130, 1399-1408 (1984)) or pLS32 (Tanaka, T and Ogra, M. FEBS Lett. 422, 243-246 (1998)), and pAMB1 (Swinfield, T. J., et al. Gene 87, 79-90 (1990)). Examples of the nucleic acid sequence that promotes plasmid replication in Bacillus subtilis include a plasmid or a portion thereof, or an origin of replication or a variant thereof, which is known to activate a replication mechanism by rolling circle type, theta type, oriC, phage, or the like. In one embodiment, the nucleic acid sequence that promotes plasmid replication in Bacillus subtilis can include a sequence that is identical or similar to a known replication origin (for example, 90% or more, 95% or more, 97% or more, 98% or more, 99% or more, or 99.5% or more sequence identity). In one embodiment, the nucleic acid sequence that promotes plasmid replication in a microbial host cell may be arranged within or outside a continuous region where the nucleic acid sequence required to constitute a virus is present.

[0228] In one embodiment, the virus-derived construct plasmids of the present disclosure can be produced or used in cells of organisms other than Bacillus subtilis, and thus can contain a transcriptional/translational regulatory sequence that operates in these organisms, such as an origin of replication, a promoter, and a transcription termination sequence. The transcriptional/translational regulatory sequence for each organism is known and can be appropriately selected by those skilled in the art. In one embodiment, the virus-derived construct plasmids of the present disclosure can be produced or replicated in Escherichia coli, a yeast, and the like, and thus can contain a transcriptional/translational regulatory sequence that operates in these microorganisms. In one embodiment, the virus-derived construct plasmids of the present disclosure can be introduced into producer cells and thus can contain a transcriptional/translational regulatory sequence that operates in producer cells. In particular, since the producer cell can be an animal cell, the virus-derived construct plasmids of the present disclosure can contain a transcriptional/translational regulatory sequence that operates in an animal cell. In one embodiment, the virus-derived construct plasmids of the present disclosure do not contain the sequence of at least some genes of the entire genome of the virus.

[0229] In one embodiment, the virus-derived construct plasmid of the present disclosure contains a nucleic acid sequence involved in host cell biosynthesis. The nucleic acid sequence involved in host cell biosynthesis is a nucleic acid sequence containing genes involved in communication (metabolism, endoplasmic reticulum processing, and the like), anti-apoptosis, oxidative stress, and cell proliferation in cells, and examples of such genes include V40 Large T antigen (SV40LTA), TAX, Kras, Myc, MIR17HG, BCL-2, BCL-XL, PDIA2, XBP1, HSPA5, pyruvate carboxylase (PC), PDK, HIF1A, NRF2, and CPSF6.

[0230] In one embodiment, the virus-derived construct plasmid of the present disclosure contains a desired gene. In one embodiment, the desired gene can be located between two terminal repeats. In one embodiment, the desired gene in the virus-derived construct plasmids of the present disclosure can ultimately be contained in the loaded nucleic acid of the virus-derived construct. Such a desired gene may be encoded by a therapeutic protein, may be encoded by a gene for gene therapy, may be encoded by a gene for gene cell therapy such as CART therapy, may be encoded by a non-protein coding functional RNA (rRNA, tRNA, microRNA (miRNA), lncRNA, or the like), or may contain a transcriptional/translational regulatory sequence such as a promoter, a terminator, an insulator, an enhancer, a silencer, and an origin of replication in combination or independently thereof. In one embodiment, the desired gene contains a viral promoter, such as a cytomegalovirus promoter, a CAG promoter, an SV40 promoter, or an RSV promoter (as necessary, upstream of the protein-coding gene). In one embodiment, the desired gene contains an IRES (as necessary, upstream of the protein-coding gene). In one embodiment, the desired gene is contained in the virus-derived construct plasmid at the position of promoter, desired gene, and terminator from upstream between a 5′ LTR and a 3′ LTR. In one embodiment, two or more sets of the promoter, desired gene, and terminator are contained in the virus-derived construct plasmid. In one embodiment, the desired gene can be integrated into chromosomes of a subject to whom the virus-derived construct is administered. In the embodiment, the desired gene may have a function of controlling expression of gene originally contained in the subject, or may result in long-term protein expression. For example, a virus-derived construct based on adeno-associated virus, a retrovirus, and the like can be incorporated into chromosomes of a subject. In one embodiment, the desired gene can be incorporated into a therapeutic cell (for example, chromosome) (for example, via a treatment of the cells with a virus-derived construct ex vivo). In one embodiment, the virus-derived construct plasmids of the present disclosure do not contain all the genes required for the origin virus of the virus-derived construct to proliferate, and accordingly, the virus-derived construct produced may be configured not to have proliferative ability.

[0231] In one embodiment, the desired gene in the virus-derived construct plasmid of the present disclosure can include a plurality of genes. In one embodiment, the desired gene can include 2 to 100 genes, for example, 2 or more, 3 or more, 4 or more, 5 or more, 7 or more, 10 or more, 12 or more, 15 or more, 20 or more, 25 or more, 30 or more, 40 or more, or 50 or more and 100 or less, 90 or less, 80 or less, 70 or less, 60 or less, 50 or less, 40 or less, 35 or less, 30 or more, 25 or less, 20 or less, 17 or less, 15 or less, 12 or less, or 10 or less genes. In one embodiment, the desired gene in the virus-derived construct plasmid of the present disclosure can have a base length of about 0.1 to 1,000 kbp, for example, about 0.1 kbp or more, about 0.3 kbp or more, about 1 kbp or more, about 2 kbp or more, about 5 kbp or more, about 7 kbp or more, about 10 kbp or more, about 20 kbp or more, about 50 kbp or more, or about 100 kbp or more, and about 1,000 kbp or less, about 700 kbp or less, about 500 kbp or less, about 200 kbp or less, about 100 kbp or less, about 70 kbp or less, about 50 kbp or less, about 20 kbp or less, or about 10 kbp or less. Since the virus-derived construct plasmids of the present disclosure can be constructed into a complex structure containing a plurality of genes by the OGAB method, a desired gene can also be constructed into a complex structure. Since the size of the loaded nucleic acid can be limited by the type of virus-derived construct, the type of virus-derived construct can be selected depending on the size of the desired gene. In one embodiment, the desired gene includes a plurality of genes, such that a nucleic acid having high functionality can be delivered to a subject, such as a combination of a tissue (for example, cancer tissue)-specific or time-specific promoter of a subject and a therapeutic gene operably linked thereto (therapeutic protein coding sequence, gene for gene therapy, gene for gene cell therapy, or the like), or a sequence encoding a series of enzymes that enables coordinated expression of a series of enzymes that control a metabolic cascade.

[0232] In one embodiment, examples of the protein encoded by the desired gene in the virus-derived construct plasmid of the present disclosure include a therapeutic polypeptide (for example, replacement therapy), and an immunogenic polypeptide (for example, pathogen polypeptide, cancer antigen polypeptide, or the like). Examples of the therapeutic polypeptide include cystic fibrosis transmembrane regulator protein (CFTR), dystrophin (mini-dystrophin and micro-dystrophin), myostatin propeptide, follistatin, soluble activin type II receptor, IGF-1, anti-inflammatory polypeptide, sarcospan, utrophin, mini-utrophin, a coagulation factor (for example, Factor VIII, Factor IX, Factor X, or the like), erythropoietin, angiostatin, endostatin, catalase, tyrosine hydroxylase, superoxide dismutase, leptin, LDL receptor, lipoprotein lipase, ornithine transcarbamylase, β-globin, α-globin, spectrin, α1-antitrypsin, adenosine deaminase, hypoxanthine-guanine phosphoribosyltransferase, β-glucocerebrosidase, sphingomyelinase, lysosomal hexosaminidase A, branched chain ketoacid dehydrogenase, RP65 protein, cytokine (for example, α-interferon, β-interferon, interferon-γ, interleukin-2, interleukin-4, granulocyte-macrophage colony-stimulating factor, lymphotoxin, or the like), peptide growth factor, neurotrophic factor and hormone (for example, somatotropin, insulin, insulin-like growth factors 1 and 2, platelet-derived growth factor, epidermal growth factor, fibroblast growth factor, nerve growth factor, neurotrophic factor-3 and -4, brain-derived neurotrophic factor, bone morphogenetic protein, glial-derived growth factor, transforming growth factor-α and -β, or the like), lysosomal acid α-glucosidase, α-galactosidase A, soluble tumor necrosis growth factor α receptor, S100A1, parvalbumin, adenylyl cyclase type 6, anti-inflammatory factor, anti-myostatin protein, aspartoacylase, suicide gene product (for example, thymidine kinase, cytosine deaminase, diphtheria toxin, or tumor necrosis factor), tumor suppressor gene product (for example, p53, Rb, or Wt-1), TRAIL, and FAS-ligand.

[0233] Examples of the pathogen polypeptide include a cell surface protein of a pathogenic organism such as bacteria, fungi, or parasites, and a protein (for example, spike protein, envelope protein, capsid protein, or the like) expressed on the surface of a virus. Specific examples of the pathogen polypeptide include orthomyxovirus immunogen (for example, influenza virus hemagglutinin (HA) or nucleoprotein), lentivirus immunogen (for example, HIV or SIV envelope GP160 protein, matrix/capsid protein, gag, pol, or env gene product), arenavirus immunogen (for example, Lassa fever virus nucleocapsid protein or envelope glycoprotein), poxvirus immunogen (for example, vaccinia L1 or L8 gene product), flavivirus immunogen (for example, yellow fever virus or Japanese encephalitis virus immunogen), filovirus immunogen (for example, Ebola virus or Marburg virus immunogen such as NP and GP gene products), bunyavirus immunogen (for example, RVFV, CCHF, or SFS virus immunogen), coronavirus immunogen (for example, human coronavirus immunogen such as human coronavirus envelope glycoprotein), polio immunogen, herpes virus immunogen (for example, CMV, EBV, or HSV immunogen), mumps virus immunogen, measles virus immunogen, rubella virus immunogen, diphtheria toxin or other diphtheria immunogens, pertussis antigen, and hepatitis (for example, hepatitis A, hepatitis B, hepatitis C, or the like) immunogen.

[0234] Examples of the cancer antigen polypeptide include BRCA1 gene product, BRCA2 gene product, gp100, tyrosinase, GAGE-1/2, BAGE, RAGE, LAGE, NY-ESO-1, CDK-4, β-catenin, MUM-1, caspase-8, KIAA0205, HPVE, SART-1, PRAME, p15, melanoma tumor antigen, MART-1, gp100 MAGE-1, MAGE-2, MAGE-3, CEA, TRP-1, TRP-2, P-15, tyrosinase, HER-2/neu gene product, CA125, LK26, FB5 (endosialin), TAG72, AFP, CA19-9, NSE, DU-PAN-2, CA50, SPan-1, CA72-4, HCG, STN (sialyl In antigen), c-erbB-2 protein, PSA, L-CanAg, estrogen receptor, milk fat globulin, p53 tumor suppressor protein, mucin antigen, telomerase, nuclear matrix protein, prostatic acid phosphatase, and papilloma virus antigen.

[0235] In one embodiment, the desired gene can be a gene for treating a particular disease (for example, gene for gene therapy). The gene to be selected for a specific disease can be appropriately selected by those skilled in the art. Examples of such a disease include infections due to various types of pathogens, cystic fibrosis, hemophilia A, hemophilia B, thalassemia, anemia, Alzheimer's disease, multiple sclerosis, Parkinson's disease, Huntington's disease, amyotrophic lateral sclerosis, spinal muscular atrophy, epilepsy, cancer (melanoma, adenocarcinoma, thymoma, lymphoma, sarcoma, lung cancer, liver cancer, colon cancer, leukemia, uterine cancer, breast cancer, prostate cancer, ovarian cancer, cervical cancer, bladder cancer, kidney cancer, pancreatic cancer, brain cancer, or the like), diabetes, muscular dystrophy, Gaucher's disease, Hurler syndrome, adenosine deaminase deficiency, glycogen storage disease, congenital emphysema, Lesch-Nyhan syndrome, Niemann-Pick disease, Tay-Sachs disease, Angelman syndrome, maple syrup urine disease, age-related macular degeneration, amaurosis, diabetic retinopathy, retinal degenerative disease, astrocytomas, glioblastoma, heart failure, peripheral artery disease, arthritis, joint disorder, intimal hyperplasia, AIDS, muscle wasting, kidney deficiency, hepatitis, LDL receptor deficiency, hyperammonemia, Krabbe's disease, Batten disease, spinal cerebral ataxias, phenylketonuria, autoimmune disease, amino acid metabolic disorder, organic acid metabolic disorder, fatty acid metabolic disorder, mitochondrial disease, sugar metabolic disorder, lysosomal disease, peroxisomal disorder, metal metabolic disorder, purine pyrimidine metabolic disorder, vitamin metabolic disorder, neurotransmitter disorder, lipid metabolic disorder, connective tissue disorder, congenital porphyria, α1-antitrypsin deficiency, lysosomal storage disease, mucopolysaccharidosis disorder, Fabry disease, Canavan disease, Leigh disease, Refsum's disease, Tourette's Syndrome, primary lateral sclerosis, progressive muscular atrophy, Pick disease, muscular dystrophy, myasthenia gravis, Binswanger disease, cerebral infarction, mood disorder, depression, bipolar affective disorder, persistent affective disorder, secondary mood disorder, schizophrenia, drug dependence, anxiety, obsessional disorder, somatoform disorder, dissociative disorder, grief, post-partum depression, hallucination, delusion, dementia, paranoia, autism spectrum disorder, attention-deficit hyperactivity disorder, psychosexual disorder, sleeping disorder, pain disorder, eating disorder, weight disorder, obesity, cachexia, anorexia nervosa, and bulimia. In one embodiment, the desired gene can be incorporated into a therapeutic cell (for example, chromosome) which is used for CART therapy or the like (for example, via a treatment of the cells with a virus-derived construct ex vivo).

[0236] In one embodiment, the present disclosure provides a virus-derived construct plasmid library containing the virus-derived construct plasmids of the present disclosure. In one embodiment, the present disclosure provides a virus-derived construct plasmid library containing a virus-derived construct plasmid containing three or more alternative unit nucleic acids as a series of parallel alternative unit nucleic acids, in which the virus-derived construct plasmid library contains a plurality of sets of corresponding alternative unit nucleic acids containing different nucleic acid sequences, and the parallel alternative unit nucleic acids on each virus-derived construct plasmid of the plurality of sets of corresponding alternative unit nucleic acids containing different nucleic acid sequences have a length of about 10 kb or more. In one embodiment, the set of corresponding alternative unit nucleic acids in the virus-derived construct plasmid library includes a set of corresponding alternative unit nucleic acids containing at least one different nucleic acid sequence of (A) a nucleic acid sequence including a terminal repeat, (B) a nucleic acid sequence encoding a packaging factor, (C) a nucleic acid sequence encoding a structural protein, and (D) a nucleic acid sequence encoding a functional cofactor. In one embodiment, each virus-derived construct plasmid in the virus-derived construct plasmid library contains (A) a nucleic acid sequence including a terminal repeat, (B) a nucleic acid sequence encoding a packaging factor, (C) a nucleic acid sequence encoding a structural protein, and (D) a nucleic acid sequence encoding a functional cofactor. In one embodiment, the set of corresponding alternative unit nucleic acids in the virus-derived construct plasmid library includes a set of corresponding alternative unit nucleic acids containing at least one different nucleic acid sequence of (A) a nucleic acid sequence encoding a desired gene located between terminal repeats, (B) a nucleic acid sequence encoding a packaging factor, (C) a nucleic acid sequence encoding a structural protein, and (D) a nucleic acid sequence encoding a functional cofactor, and a set of corresponding alternative unit nucleic acids that are located adjacently upstream thereof and contain different nucleic acid sequences encoding a promoter. In one embodiment, the plurality of sets of corresponding alternative unit nucleic acids containing different nucleic acid sequences in the virus-derived construct plasmid library contain an alternative unit nucleic acid having a GC content of 75% or more. In one embodiment, the set of corresponding alternative unit nucleic acids of the virus-derived construct plasmid library includes a plurality of sets of corresponding alternative unit nucleic acids that allow for 64 or more different parallel alternative unit nucleic acid combinations, and each virus-derived construct plasmid contains the same number of parallel alternative unit nucleic acids. In one embodiment, each virus-derived construct plasmid contains a barcode nucleic acid sequence.

[0237] The virus-derived construct plasmid library of the present disclosure can also be characterized by the structure of the virus-derived construct plasmids contained therein. For example, in the case of a promoter library with different combinations of promoter portions for a common gene, each plasmid in the library can be common in sequence and order of the portion of the gene. In one embodiment, each plasmid in the library can have a common structural characteristic of having a recognition sequence for Type II restriction enzyme at a specific position (for example, upstream or downstream of a predetermined gene). In one embodiment, each plasmid in the library can have a common structural characteristic of having a recognition sequence for Type II restriction enzyme and the same sequence between the recognition sequences at a specific position (for example, upstream or downstream of a predetermined gene). In the CombiOGAB method, the plasmid preferably contains a recognition sequence for Type II restriction enzyme, since it can be operationally efficient to use the same restriction enzyme to generate different cleavage ends. In one embodiment, the library contains or consists of plasmids having different portions in common portions and combinations. The term “different portions in a combination” refers to a combination of elements such that the same for each element constituting the combination is found on different plasmids in the library, but the same combination of elements is not found on different plasmids in the library. The “common portions” can contain a sequence found in all plasmids in the library. For example, in a case where the promoter library is composed of four types of plasmids:
[0238] promoter 1+gene A+promoter 3+gene B;
[0239] promoter 2+gene A+promoter 3+gene B;
[0240] promoter 1+gene A+promoter 4+gene B; and
[0241] promoter 2+gene A+promoter 4+gene B,
[0242] the gene A and the gene B are common portions, and the combination of, for example, the promoter 1 and the promoter 3 are different portions in the combination. In one embodiment, the elements (for example, a promoter at a specific position) constituting different portions in a combination in a plasmid in a library can have functions (for example, a function as a promoter) similar to the elements of the corresponding positions of other (for example, all) plasmids in the same library, for example, corresponding elements of other species (for example, viruses of other serotypes) or variants produced by modification from the same elements can be used, but are not particularly limited, and have similar functions (for example, a function as a promoter) as in Examples, but biologically unrelated elements may be contained at the corresponding positions of the plasmids.

### (Virus-Derived Construct)

[0243] The virus-derived construct plasmid of the present disclosure is used to produce a virus-derived construct. In one embodiment, the present disclosure provides a method for producing a virus-derived construct using the virus-derived construct plasmid of the present disclosure. In one embodiment, the present disclosure provides a virus-derived construct-containing composition or virus-derived construct produced as described above. Examples of the virus-derived construct include virus-derived constructs based on an alphavirus, a vaccinia virus, a measles virus, an influenza virus, a vesicular stomatitis virus, a coronavirus, a Sindbis virus, a Semliki Forest virus, a herpes simplex virus, a retrovirus, a lentivirus, a rabies virus, a Sendai virus, an adeno-associated virus, an adenovirus, a reovirus, a coxsackievirus, and a Newcastle disease virus. In one embodiment, the virus-derived construct is a virus-derived construct based on a retrovirus, a lentivirus, an adeno-associated virus, or an adenovirus. In one embodiment, the present disclosure provides a method for producing a virus-derived construct library using the virus-derived construct plasmids of the present disclosure and a virus-derived construct library produced by the method.

[0244] In one embodiment, the virus-derived construct plasmid of the present disclosure is introduced into a producer cell to produce a virus-derived construct. Examples of the producer cell include, but are not limited to, human embryonic kidney cells (prepared by transfecting human embryonic kidney cells with DNA obtained by cleaving adenovirus 5), 911 cells, PER.C6 cells, E1-transformed amniotic membrane cells, E1-transformed A549 cells, GH329: HeLa cells, HEK293 cells, IT293SF cells, HEK293 T, HEK293 F, Vero cells, CHO cells, Sf9 cells, Freestyle (trademark) 293-F, Expi293-F (trademark), Expi293 inducible, Expi293 NGT-Viral Production Cells 1.0, Viral Production Cells 2.0 (VPC 2.0 cells), AAVpro (registered trademark) 293T Cell Line, Lenti-X (trademark) 293T Cell Line, FreeStyle (trademark) CHO-S cells, ExpiCHO-S(trademark), VirusExpress (trademark) 293 AAV producing cells, and VirusExpress (trademark) 293T lentivirus-producing cells. Any known suitable producer cell can be selected depending on the type of virus-derived construct to be produced. In one embodiment, the virus-derived construct plasmid of the present disclosure is deficient in a small number (for example, 1, 2, 3, 4, or 5) of genes of the origin virus of the virus-derived construct, and may contain all other genes. In one embodiment, the virus-derived construct plasmid of the present disclosure is deficient in a portion of a set of genes required to produce a virus-derived construct, and the genes of the set of genes deficient in the virus-derived construct plasmid are supplied in the producer cell in trans with the virus-derived construct plasmid. In one embodiment, the virus-derived construct plasmid of the present disclosure can be introduced alone into a producer cell without being combined with another plasmid to allow for the production of a virus-derived construct. In one embodiment, the virus-derived construct plasmid of the present disclosure can be introduced into a producer cell expressing all of the genes in which the virus-derived construct plasmid is deficient in the set of genes required to produce a virus-derived construct. For example, the virus-derived construct plasmids of the present disclosure containing AAV cap and rep, and adenoviruses E2A, E4, and VA can be introduced alone into HEK293 cells expressing adenoviruses E1A and E1B to produce virus-derived constructs. In one embodiment, the virus-derived construct plasmid of the present disclosure can be introduced into a producer cell together with another nucleic acid containing a gene in which the virus-derived construct plasmid is deficient in the set of genes required to produce a virus-derived construct or a product of the gene (for example, viral particles) thereof.

[0245] In one embodiment, a virus-derived construct can be produced by introducing a virus-derived construct plasmid into a producer cell infected with the origin virus of the virus-derived construct and causing homologous recombination in the cells. The virus-derived construct plasmid used in the embodiment contains nucleic acid sequences having homology to the desired gene and to any region of the genome of the origin virus (for example, regions between genes). In one embodiment, the virus-derived construct plasmid can have a structure containing a desired gene between any genes in the genome of the origin virus of the virus-derived construct to be produced. In one embodiment, at least of a part of the nucleic acids contained in the virus-derived construct plasmid are incorporated into chromosomes of the producer cell.

[0246] In one embodiment, the virus-derived construct plasmid of the present disclosure contains segments for cutting loaded nucleic acids of the origin virus of the virus-derived construct to be produced (LTR in a retrovirus, ITR in AAV, and the like), and in one embodiment, the desired gene is contained between the segments. In one embodiment, the virus-derived construct plasmid of the present disclosure contains a desired gene between the segments and a promoter and/or terminator operably linked thereto (for example, those that are operable in the subject to which the virus-derived construct is targeted). In one embodiment, the virus-derived construct plasmids of the present disclosure do not contain the genes required for replication of the origin virus of the virus-derived construct between the segments. In one embodiment, the virus-derived construct plasmid of the present disclosure contains a packaging signal of the origin virus of the virus-derived construct to be produced.

[0247] The virus-derived construct produced has a structural protein (capsid or the like), which can be involved in binding to tissue or cell. Therefore, the targeting of the virus-derived construct to tissue or cell can be modulated by modifying the structural protein to modify its binding to the tissue or cell (or a surface structure thereof). In one embodiment, the virus-derived construct plasmids of the present disclosure may contain genes encoding a structural protein, and the structural protein may be modified. For example, the modification of the structural protein that modulates targeting of tissue or cell includes substitution or fusion with other proteins (other viral capsids (for example, capsids of other serotypes of viruses, VSV-G), antigen-binding regions of antibodies, ligand proteins of the subject organism (ligands for cancer antigens), and the like). In addition, a virus-derived construct containing an envelope can also contain cell membrane components of producer cells in the envelope. Therefore, the targeting of the virus-derived construct containing an envelope to tissue or cell can be modulated by modifying the cell membrane components of the producer cells. In the case of a virus-derived construct without a structural protein, a non-virus-derived material such as a lipid particle can be used to modulate targeting to cells. In one embodiment, the virus-derived construct may be designed to target neural cells (cells of peripheral nervous system or central nervous system, brain cells such as neurons and oligodendrocytes, and the like), lung cells, ocular cells (retinal cells, retinal pigment epithelium, corneal cells, and the like), epithelial cells (for example, intestinal or respiratory epithelial cells), muscle cells (for example, skeletal muscle cells, cardiac muscle cells, smooth muscle cells, and diaphragm muscle cells), dendritic cells, pancreatic cells (islet cells and the like), hepatocytes, cardiomyocytes, bone cells (for example, bone marrow stem cells), hematopoietic stem cells, spleen cells, keratinocytes, fibroblasts, endothelial cells, prostate cells, germ cells, cancer cells, and the like. A surface structure (a receptor or the like) specific to each cell is known, and those skilled in the art can appropriately select a protein that strongly or specifically binds to the surface structure.

[0248] In one embodiment, the virus-derived construct plasmids of the present disclosure may contain a gene encoding a protein obtained by attenuating the protein of the origin virus of the virus-derived construct to be produced. The virus-derived construct plasmids of the present disclosure can contain a gene encoding any known attenuated viral protein.

[0249] In one embodiment, the present disclosure provides a plasmid-containing composition containing a population of virus-derived construct plasmids of the present disclosure. In one embodiment, the plasmid-containing composition can have a covalently closed circular (CCC) purity of the plasmid of about 60% or more, about 70% or more, about 75% or more, about 80% or more, about 85% or more, about 90% or more, or about 95% or more. The virus-derived construct plasmids of the present disclosure, the virus-derived construct plasmid library, and the virus-derived construct plasmid-containing composition of the present disclosure produced by the method of the present disclosure can have structural characteristics that are not fully analyzable or significantly difficult to analyze, such as in the steric conformation or base modification of plasmids. Therefore, the characteristic of being produced by the method of the present disclosure is one of the characteristics of appropriately expressing the virus-derived construct plasmids, the virus-derived construct plasmid library, and the virus-derived construct plasmid-containing composition of the present disclosure.

### Adenovirus-Derived Construct

[0250] An adenovirus is a virus belonging to the genus Mastadenovirus in the family Adenoviridae, and the viral particle is composed of a nucleocapsid and a double-stranded linear DNA genome, and has an icosahedral structure of 90 to 100 nm. Infection of an adenovirus is initiated by adsorption of the viral capsids to the coxsackie-adenovirus receptor (CAR) on the cell surface, and then the virus can enter into the cell via the integrins on the cell surface. Thereafter, the viral genome that escapes from the lysosome can reach the nucleus, resulting in replication of the viral genome. Viral replication is initiated by first expressing E1A protein and activating expression of other early proteins E1B, E2, E3, and E4. In the viral genome, a complex, in which a terminal protein (TP) expressed from E2 and deoxycytidine are covalently bound to each other and a polymerase is further bound thereto, is formed, and replication is initiated. The genome also contains five late transcription units (L1, L2, L3, L4, and L5) encoding structural proteins, including penton (L2), hexon (L3), scaffold protein (L4), and fiber protein (L5), under the control of a single promoter. Both ends of the genome contain inverted terminal repeats (ITRs) required for virus replication. The structural proteins of the virus are translated in the cytoplasm and then migrate into the nucleus to constitute viral particles, such that the structural proteins recognize the packaging signal (ψ) of the viral genome and package the genome. In addition, an adenovirus produces protein-non-coding VA RNAs, which are encoded by the VA gene. The adenoviral particles can have L2 and L3 capsids.

[0251] To date, 52 human adenovirus antigenic types have been identified and classified into 6 subgroups based on hemagglutination properties and sequence homology: Subgroup A (for example, serotypes 12, 18, and 31), Subgroup B (for example, serotypes 3, 7, 11, 14, 16, 21, 34, 35, and 50), Subgroup C (for example, serotypes 1, 2, 5, and 6), Subgroup D (for example, serotypes 8, 9, 10, 13, 15, 17, 19, 20, 22 to 30, 32, 33, 36 to 39, and 42 to 48), Subgroup E (for example, serotype 4), Subgroup F (for example, serotypes 40 and 41), and unclassified serotype groups (for example, serotypes 49 and 51).

[0252] In one embodiment, the adenovirus-derived construct plasmids contain at least one of the nucleic acid sequences required to construct an adenovirus-derived construct, and a desired gene. In one embodiment, the adenovirus-derived construct plasmid of the present disclosure contains a desired gene between a 5′ ITR and a 3′ ITR. In one embodiment, the adenovirus-derived construct plasmids contain a desired gene, a promoter, and a terminator between the 5′ ITR and the 3′ ITR. In one embodiment, the adenovirus-derived construct plasmid does not contain one or a plurality (for example, all) of the nucleic acid sequences required to construct an adenovirus-derived construct between the 5′ ITR and the 3′ ITR. In one embodiment, the adenovirus-derived construct plasmid is configured to function in a producer cell so that the virus-derived construct plasmid and the producer cell contain the nucleic acid sequences required to construct an adenovirus-derived construct. In one embodiment, one or a plurality (for example, all) of the genes not contained in the virus-derived construct plasmid among the nucleic acid sequences required to construct an adenovirus-derived construct may be encoded by the chromosomes of the producer cell.

[0253] In one embodiment, the nucleic acid sequence required to construct an adenovirus-derived construct can contain a gene encoding E1A, E1B, E2A, E2B, E3, E4, L1, L2, L3, L4, L5, IX, and IVa2. In one embodiment, the nucleic acid sequence required to construct an adenovirus-derived construct can be all genes of adenovirus other than E3. In one embodiment, the nucleic acid sequence required to construct an adenovirus-derived construct can contain a nucleic acid sequence encoding a structural protein (L2 or L3), a nucleic acid sequence encoding a packaging factor (E1A, E1B, E2A, E2B, or E4), two terminal repeats (5′ ITR and 3′ ITR), and a nucleic acid sequence encoding a functional cofactor. In one embodiment, the nucleic acid sequence encoding a functional cofactor can be all adenoviral genes other than L2, L3, E1A, E1B, E2A, E3, E2B, E4, a 5′ ITR, and a 3′ ITR. In one embodiment, the adenovirus-derived construct plasmid may not contain one or a plurality of VA, E1A, E1B, E2A, E2B, and E4, and in one embodiment, the nucleic acid sequence required to construct an adenovirus-derived construct contains genes. In certain embodiments, the adenovirus-derived construct plasmid does not contain E1A and E1B. In one embodiment, the adenovirus-derived construct plasmid is deficient in E1A, and a desired gene may be inserted into the deficient site. VA RNA is known to interact with exportin, RISK, Dicer, and the like in the human, and the deletion of VA from the adenovirus-derived construct plasmid can reduce side effects to adenovirus-derived construct infected cells. Since E1A, E1B, E2A, E2B, and E4 can be genes required for adenovirus replication, an adenovirus-derived construct plasmid that is deficient in these genes can have reduced replicative ability in infected cells.

[0254] In one embodiment, the adenovirus-derived construct of the present disclosure can be derived from human subgroup C, for example, serotype 2 or serotype 5. In one embodiment, the adenovirus-derived construct of the present disclosure can be derived from serotype 12 (Subgroup A), serotype 7 or serotype 35 (Subgroup B), serotype 30 or serotype 36 (Subgroup D), serotype 4 (Subgroup E), or serotype 41 (Subgroup F). Examples of the producer cells for producing an adenovirus-derived construct include cells such as HEK293, HEK293T, HEK293F, Hela, and Sf9.

### Adeno-Associated Virus-Derived Construct

[0255] An adeno-associated virus (AAV) is a linear, a single-stranded DNA virus from the genus Dependovirus in the family Parvoviridae, with viral particles of 20 to 26 nm in diameter. Adenovirus elements are required for AAV proliferation. At the quantitative end of the AAV genome, there is a T-shaped hairpin structure called an inverted terminal repeat (ITR). A portion of the ITR serves as a origin of replication and serves as a primer. In addition, the ITR is also required for packaging into viral particles and integration into chromosomal DNA of a host cell. In the left half of the genome, there is a rep gene encoding a non-structural protein, that is, a regulatory protein (Rep78, Rep76, Rep52, or Rep40) responsible for replication and transcription, and in the right half of the genome, there is a cap gene encoding three capsid proteins of structural proteins (VP1, VP2, and VP3).

[0256] The life cycle of AAV is divided into latent infection and lytic infection. The former is a case of infection by itself, and is characterized by being incorporated into the AAVS1 region (19q13.3-qter) of the long arm of chromosome 19 of the host cell. The incorporation is due to non-homologous recombination and involves Rep. It has been reported that Rep78/Rep76 binds to a base sequence (GAGC repeat sequence) commonly present in the AAVS1 region and the Rep binding region of ITR. Thus, it is considered that when target cells are infected with wild-type AAV, Rep binds to the ITR and AAVS1 of AAV, and site-specific integration of AAV genome into chromosome 19 occurs via Rep. In a case where a helper virus such as an adenovirus is simultaneously infected, when a cell latently infected with AAV is further coinfected with the helper virus, replication of AAV occurs, and a large amount of virus is released due to cell destruction (lytic infection).

[0257] In one embodiment, the AAV-derived construct plasmid contains at least one of the nucleic acid sequences required to construct an AAV-derived construct, and a desired gene. In one embodiment, the AAV-derived construct plasmid of the present disclosure contains a desired gene between a 5′ ITR and a 3′ ITR. In one embodiment, the AAV-derived construct plasmid contains a desired gene, a promoter, and a terminator between the 5′ ITR and the 3′ ITR. In one embodiment, the AAV-derived construct plasmid does not contain one or a plurality (for example, all) of the nucleic acid sequences required to construct an AAV-derived construct between the 5′ ITR and the 3′ ITR. In one embodiment, the AAV-derived construct plasmid is configured to function in a producer cell so that the virus-derived construct plasmid and the producer cell contain the nucleic acid sequences required to construct an AAV-derived construct. In one embodiment, one or a plurality (for example, all) of the genes not contained in the virus-derived construct plasmid among the nucleic acid sequences required to construct an AAV-derived construct may be encoded by the chromosomes of the producer cell.

[0258] In one embodiment, the nucleic acid sequence required to construct an AAV-derived construct can be a 5′ ITR, rep, cap, an assembly activating protein (AAP), a membrane associated accessory protein (MAAP), and a 3′ ITR of AAV, and the adenovirus E1A, E1B, E2A, VA, or E4. In one embodiment, the nucleic acid sequence required to construct an AAV-derived construct can include a nucleic acid sequence encoding an AAV structural protein (cap), a nucleic acid sequence encoding a packaging factor for AAV (rep), two terminal repeats of AAV (5′ ITR and 3′ ITR), and a nucleic acid sequence encoding a functional cofactor (adenovirus E1A, E1B, E2A, VA, or E4). In one embodiment, the AAV-derived construct plasmid may not contain one or a plurality of rep, cap, VA, E1A, E1B, E2A, and E4, and in one embodiment, the nucleic acid sequence required to construct an adenovirus-derived construct contains these sequences.

[0259] AAV serotypes 1 to 12 based on capsid have been reported. In addition, serotypes of rh10, DJ, DJ/8, PHP.eB, PHP.S, AAV2-retro, AAV2-QuadYF, AAV2.7m8, AAV6.2, rh.74, AAV2.5, AAV-TT, and Anc80 have also been reported. The AAV-derived construct of the present disclosure may be produced based on AAV of a suitable serotype depending on the target tissue. For example, the relationship of (serotype): (target tissue) may be selected as follows: (AAV1): (mmmmuscle, liver, respiratory tract, and nerve cells), (AAV2): (muscle, liver, and nerve cells), (AAV3): (muscle, liver, and nerve cells), (AAV4): (muscle and ependymal cells), (AAV5): (muscle, liver, nerve cells, glial cells, and respiratory tract), (AAV6): (muscle, liver, respiratory tract, and nerve cells), (AAV7): (muscle and liver), (AAV8): (muscle and liver), and (AAV9): (muscle, liver, and respiratory tract). Examples of the producer cells for producing an AAV-derived construct include cells such as HEK293, HEK293T, HEK293F, Hela, and Sf9. Examples of AAV capsids include wild-type as well as capsids with targeted mutations (AAV218, AAV2.5, AAV-TT, AAV9.HR, and the like), capsids with random mutations (AAV-PHP.B and the like), and capsids designed in silico (Anc 80 and the like), and in one embodiment, the AAV-derived construct of the present disclosure may contain these modified capsids and the AAV-derived construct plasmids of the present disclosure may be constructed to encode these modified capsids. As used herein, in a case where a nucleic acid sequence is derived from a particular serotype, it is intended that the nucleic acid sequence may encode a wild-type capsid or a capsid modified as described above based on the wild-type capsid.

### Retrovirus-Derived Construct

[0260] As used herein, the term “retrovirus” generally refers to a virus of the family Retroviridae. A retrovirus is a double-stranded RNA enveloped virus primarily characterized by its ability to reverse transcribe the genome from RNA to DNA. The virion is about 100 to 120 nm in length and in diameter, and contains a dimeric genome of identical positive-stranded RNA complexed with nucleocapsid proteins. The genome is encapsulated in a capsid containing enzyme proteins required for viral infection, that is, reverse transcriptase, integrase, and protease. The matrix proteins form the outer layer of the capsid core that interacts with the envelope, which is a lipid bilayer derived from the host cell membrane, surrounding the viral nuclear particle. Viral envelope glycoproteins that recognize a specific receptor on the host cell and initiate the infection process are immobilized on the bilayer. Envelope proteins are formed by two subunits, transmembrane (TM), which immobilizes proteins within lipid membranes, and surface (SU), which binds to cellular receptors.

[0261] Examples of the retrovirus include, but are not limited to, murine leukemia virus (MLV), human immunodeficiency virus (HIV), equine infectious anemia virus (EIAV), mouse mammary tumor virus (MMTV), Rous sarcoma virus (RSV), Fujinami sarcoma virus (FSV), Moloney murine leukemia virus (Mo-MLV), FBR murine osteosarcoma virus (FBR MSV), Moloney murine sarcoma virus (Mo-MSV), Abelson murine leukemia virus (A-MLV), avian myelocytomatosis virus 29 (MC29), avian erythroblastosis virus (AEV), and a lentivirus. Lentiviruses can be divided into a “primate lentivirus” and a “non-primate lentivirus”. Examples of the primate lentivirus include human immunodeficiency virus (HIV), which is the causative agent of human acquired immunodeficiency syndrome (AIDS), and simian immunodeficiency virus (SIV). The non-primate lentiviral group includes the prototype “slow virus” visna-maedi virus (VMV), and the related caprine arthritis encephalitis virus (CAEV), equine infectious anemia virus (EIAV), and the more recently described feline immunodeficiency virus (FIV) and bovine immunodeficiency virus (BIV).

[0262] During the infection process, the retrovirus first is attached to a specific cell surface receptor. Upon entry into a susceptible host cell, the retroviral RNA genome is copied into DNA by reverse transcriptase. This DNA is transported to the host cell nucleus and then integrated into the host genome, and this state is called a provirus. The provirus is stable in host chromosomes during cell division and is transcribed like other cellular proteins. The provirus encodes the proteins and packaging mechanisms required to produce more viruses, and can sprout and leave the cell. When the retrovirus emerges from host cells, the retrovirus has a host cell lipid membrane. In this way, the host cell-derived membrane protein becomes portion of the retroviral particles.

[0263] The retroviral genome contains four genes, gag (group specific antigen), pro (protease), pol (polymerase) and env (envelope). The gag sequence encodes three major structural proteins: a matrix protein, a nucleocapsid protein, and a capsid protein. The pro sequence encodes a protease responsible for cleaving Gag and Gag-Pol during particle assembly, emergence, and maturation. The pol sequence encodes the enzymes of reverse transcriptase and integrase, and the former catalyzes the reverse transcription of the viral genome from RNA to DNA during the infection process, while the latter is responsible for processing the LTR and integrating the proviral DNA into the host cell genome. The env sequence encodes both SU and TM subunits of the envelope glycoprotein. The ability of retrovirus to bind to its target host cells using specific cell surface receptors is conferred by the surface component (SU) of the Env protein, whereas the ability of retrovirus to enter cells via membrane fusion can be conferred by the membrane-anchored transmembrane component (TM). The retroviral genome contains elements required to promote gene expression, reverse transcription, and integration into the host cell chromosome, and examples of the elements include two LTRs (long terminal repeats), a packaging signal (ψ) sequence required for specific packaging of viral RNA into a newly formed virion, and a polypurine tract (PPT) that functions as a site to initiate positive-strand DNA synthesis during reverse transcription. Long terminal repeats (LTR) are about 600 nt in length, of which the U3 region is 450, the R sequence is 100, and the U5 region is about 70 nt in length.

[0264] The genome of a complex retrovirus, such as a lentivirus, can contain, in addition to gag, pro, pol, and env, accessory genes that regulate viral gene expression, infectious particle assembly, and modulate viral replication in infected cells. A representative lentivirus is HIV-1. The lentivirus can contain two regulatory genes, tat, and rev. For example, HIV-1 further contains vif, vpr, vpu, and nef. In addition, accessory genes such as vpx are present. These accessory genes are involved in the synthesis and processing of viral RNA and control of other replication functions. In particular, HIV also contains structural landmarks (TAR, RRE, PE, SLIP, CRS, and INS) and the like. The lentiviral particles can contain the capsid protein of p24.

[0265] In one embodiment, the retrovirus-derived construct plasmid contains at least one of the nucleic acid sequences required to construct a retrovirus-derived construct, and a desired gene. In one embodiment, the retrovirus-derived construct plasmid of the present disclosure contains a desired gene between a 5′ LTR and a 3′ LTR. In one embodiment, the retrovirus-derived construct plasmid may contain a primer binding site (PBS) and/or a polypurine tract (PPT) between the 5′ LTR and the desired gene. In one embodiment, the retrovirus-derived construct plasmid may contain a woodchuck hepatitis virus post-transcriptional regulatory element (WPRE) between the desired gene and the 3′ LTR. In one embodiment, the retrovirus-derived construct plasmid is configured to function in a producer cell so that the virus-derived construct plasmid and the producer cell contain the nucleic acid sequences required to construct a retrovirus-derived construct. In one embodiment, one or a plurality (for example, all) of the genes not contained in the virus-derived construct plasmid among the nucleic acid sequences required to construct a retrovirus-derived construct may be encoded by the chromosomes of the producer cell. In one embodiment, env may be replaced with a gene encoding VSV-G (glycoprotein G of vesicular stomatitis virus (VSV)) during construction of a retrovirus-derived construct. In one embodiment, the retrovirus-derived construct (including a lentivirus) plasmid may additionally contain the VSV-G gene. In one embodiment, when the retrovirus-derived construct (including a lentivirus) is constructed, a fusion glycoprotein (FuG-B) in which the glycoprotein gene of rabies virus (RV-G) or the intracellular domain of RV-G is replaced with that of the vesicular stomatitis virus glycoprotein (VSV-G) may be used in addition to or in place of env, and the retrovirus-derived construct (including a lentivirus) plasmids may contain these genes.

[0266] In one embodiment, the nucleic acid sequence required to construct a retrovirus-derived construct can contain a nucleic acid sequence encoding a structural protein (gag), a packaging factor (ψ), two terminal repeats (5′ LTR and 3′ LTR), and a nucleic acid sequence encoding a functional cofactor. In one embodiment, the nucleic acid sequence encoding a functional cofactor can be pro, pol, and env. In one embodiment, the retrovirus-derived construct plasmid may not contain one or a plurality of gag, pro, pol, and env, and in one embodiment, the nucleic acid sequence required to construct a retrovirus-derived construct contains these genes. Since pol can be a gene required for retrovirus replication, a retrovirus-derived construct plasmid that is deficient in these genes can have reduced replicative ability in infected cells. In one embodiment, the retrovirus-derived construct plasmid does not contain one or a plurality (for example, all) of the nucleic acid sequences required to construct a retrovirus-derived construct between the 5′ LTR and the 3′ LTR. In one embodiment, the retrovirus-derived construct plasmid of the present disclosure contains a desired gene between a 5′ LTR and a 3′ LTR. In one embodiment, the retrovirus-derived construct plasmid contains a desired gene, a promoter, and a terminator between the 5′ LTR and the 3′ LTR. In one embodiment, the retrovirus-derived construct plasmid may be modified to be deficient in the U3 region of the LTR. Examples of the producer cells for producing a retrovirus-derived construct include cells such as HEK293.

[0267] In one embodiment, the nucleic acid sequence required to construct a lentivirus-derived construct can contain a nucleic acid sequence encoding a structural protein (gag, pol, VSV-G, or env), a packaging factor (packaging signal (ψ) sequence), two terminal repeats (5′ LTR and 3′ LTR), and a nucleic acid sequence encoding a functional cofactor. In one embodiment, the nucleic acid sequence encoding a functional cofactor can be rev. In one embodiment, the lentivirus-derived construct plasmid may not contain one or a plurality of rev, gag, pro, pol, and env, and in one embodiment, the nucleic acid sequence required to construct a lentivirus-derived construct contains these genes. Since pol and rev can be a gene required for lentivirus replication, a lentivirus-derived construct plasmid that is deficient in these genes can have reduced replicative ability in infected cells. In one embodiment, the lentivirus-derived construct plasmid may contain one or a plurality of tat, vif, vpr, vpu, nef, vpx, TAR, RRE, PE, SLIP, CRS, INS, APP, MAAP, RPE, PPT, PRE, WRPE, and oPRE. In one embodiment, the lentivirus-derived construct plasmid does not contain one or a plurality (for example, all) of the nucleic acid sequences required to construct a lentivirus-derived construct between the 5′ LTR and the 3′ LTR. In one embodiment, the lentivirus-derived construct plasmid of the present disclosure contains a desired gene between a 5′ LTR and a 3′ LTR. In one embodiment, the lentivirus-derived construct plasmid contains a desired gene, a promoter, a terminator, and WPRE between the 5′ LTR and the 3′ LTR. In one embodiment, the lentivirus-derived construct plasmid may be modified to be deficient in the U3 region of the LTR and TAT. In one embodiment, the retrovirus-derived construct plasmid may be modified to be deficient in the U3 region of the LTR. Examples of the producer cells for producing a lentivirus-derived construct include cells such as HEK293T, HEK293, and Hela.

### Herpes Simplex Virus-Derived Construct.

[0268] Herpes simplex virus (HSV) is a virus of the family Herpesviridae, the subfamily Alphaherpesviridae, and the genus Simplexvirus. The HSV particles have a diameter of about 100 nm and have a structure in which an icosahedral capsid is covered with an envelope. Inside the capsid, linear double-stranded DNA of about 150 kbp is packaged, and the viral DNA genome encodes at least 74 viral proteins. Genes encoding these viral proteins are classified into three groups (α, β, and γ) depending on the expression timing, and the expression of each group is controlled in a cascade manner. The α gene group includes α0, α4, α22, α27, and α47, and α0, α4, α22, and α27 encode proteins that control the expression of other viral genes. When a genes are expressed, these gene products activate the expression of the β gene cluster. The β gene group mainly encodes a protein essential for viral DNA replication, such as a DNA polymerase complex and a DNA primase/helicase complex, and an enzyme group involved in deoxyribonucleotide metabolism, such as thymidine kinase (TK) and ribonucleotide reductase. Thereafter, a group of γ genes encoding structural proteins of the viral particles is expressed, and new infectious viruses are produced.

[0269] Viral particles that enter from sensory nerve endings ascend within the axon and reach the nucleus of the neuronal cell, and begin to proliferate or remain latent. HSV latent in sensory ganglion does not produce infectious viruses, and only a transcript called latency associated transcript (LAT) is constitutively expressed from the viral genome. A latency active promoter (LAP), which is a promoter of LAT, is a promoter that enables permanent gene expression in neurons, which can be useful in gene therapy targeting neurons. The latently infected nerve cell HSV is reactivated and centrifugally transported in the axon, and recurrent onset can occur in the skin and mucosa.

[0270] Examples of advantages of an HSV-derived construct include: (1) it can infect and proliferate in most cultured cells in a broad host range; (2) it can infect both dividing and non-dividing cells; (3) it has a high tolerance for loading exogenous genes; (4) it possesses autologous TK so that the antiviral agents acyclovir or ganciclovia are effective and can be treated even when unexpected proliferation occurs; (5) it is stably present as episomes in neuronal cells and can sustain gene expression for a long period of time depending on the promoter; (6) it exhibits similar pathogenicity to a human to a mouse and can be utilized as model animals; and the like. Also, strong cytotoxicity can be beneficial for the treatment of tumors.

[0271] In one embodiment, the HSV-derived construct plasmid contains at least one of the nucleic acid sequences required to construct an HSV-derived construct, and a desired gene. In one embodiment, the HSV-derived construct plasmid contains an origin of DNA replication (ori) upstream of the desired gene. In one embodiment, the HSV-derived construct plasmid can contain LAP (for example, between ori and the desired gene), which can result in long-term expression of the introduced gene in the host cell of the HSV-derived construct. In one embodiment, the HSV-derived construct plasmid is configured to function in a producer cell so that the virus-derived construct plasmid and the producer cell contain the nucleic acid sequences required to construct an HSV-derived construct. In one embodiment, one or a plurality (for example, all) of the genes or gene products thereof that are not contained in the virus-derived construct plasmid among the nucleic acid sequences required to construct an HSV-derived construct can be supplied in producer cells in trans with the virus-derived construct plasmid. For example, the gene not contained in the virus-derived construct plasmid may be encoded by the chromosome of the producer cell, or may be encoded by another nucleic acid molecule (for example, a plasmid) to be introduced into the producer cell, or a gene product (which may be in the form of a viral particle) of the gene not contained in the virus-derived construct plasmid may be introduced into the producer cell. In one embodiment, a nucleic acid molecule other than the virus-derived construct plasmid of the present disclosure introduced into the producer cells may be deficient in one or a plurality of the pac and the origin of DNA replication (ori), and it can be avoided that the loaded nucleic acid contains a nucleic acid derived from this nucleic acid.

[0272] In one embodiment, the nucleic acid sequence required to construct an HSV-derived construct can be all genes of HSV. In one embodiment, the nucleic acid sequence required to construct an HSV-derived construct can contain genes encoding UL9, UL19, UL26, UL35, US6, US7, and US11. In one embodiment, the nucleic acid sequence required to construct an HSV-derived construct can be all genes of HSV other than one or a plurality of α0, α22, and α47. In one embodiment, the nucleic acid sequence required to construct an HSV-derived construct can be all genes of HSV other than α22. In one embodiment, the HSV-derived construct plasmid may not contain one or a plurality of α0, α4, α22, α27, and α47, and in one embodiment, the nucleic acid sequence required to construct an HSV-derived construct contains these genes. In one embodiment, the HSV-derived construct plasmid is deficient in one or both of the α4 and α27 genes. In one embodiment, the HSV-derived construct plasmid is deficient in ICP6. In one embodiment, the HSV-derived construct plasmid is deficient in α4, α22, and α27.

[0273] In one embodiment, the HSV-derived construct can be modified to attenuate. In one embodiment, the HSV-derived construct plasmid can be modified to be deficient in one or a plurality of thymidine kinase (TK), ribonucleotide reductase (RR), deoxyuridine triphosphatase (dUTPase), and γ34.5. In one embodiment, the HSV-derived construct plasmid can be modified to introduce a gene encoding a cytokine (such as an immune activating cytokine) at the γ34.5 deficient site. In one embodiment, an HSV-derived construct that is deficient in these genes can be obtained by producing an HSV-derived construct without supplying these genes to producer cells containing the HSV-derived construct plasmid that is deficient in these genes. For example, since TK can be highly expressed in cancer cells, the TK-deficient HSV-derived construct can function selectively in cancer cells. Examples of the producer cells for producing an HSV-derived construct include cells such as Hela and Vero.

### Sendai Virus-Derived Construct

[0274] Sendai virus (SeV) is a negative-stranded RNA virus classified into the genus Respirovirus of the family Paramyxoviridae. The Sendai virus can also infect non-dividing cells, including neurons. After infection with Sendai virus, the viral genome does not integrate into the host cell chromosomes and remains in the cytoplasm in the RNA state.

[0275] Genes encoding proteins of Sendai virus include N, P, M, F, HN, and L genes. The N, P, M, F, HN, and L genes encode nucleocapsid, phospho, matrix, fusion, hemagglutinin-neuraminidase, and large protein, respectively. Generally, on the genome of the wild-type Sendai virus, following a 3′ short leader region (LE), six genes encoding N (nucleocapsid protein), P (phosphoprotein), M (matrix protein), F (fusion protein), HN (hemagglutinin-neuraminidase), and L (large protein) are arranged, and the short 5′ trailer region (TR) exists at the other end. Accessory proteins called C and V are also translated from the region of the P gene.

[0276] The Sendai virus expresses genes by both tubulin in the cytoplasm of the host cell and RNA polymerase (L protein) of the Sendai virus. The Sendai virus does not interact with the genome of the host cell and is not pathogenic to humans. These characteristics of the Sendai virus suggest the safety of the Sendai virus-derived construct in humans. M protein, F protein, and HN protein can be responsible for the formation of viral particles of the Sendai virus and viral infection. N protein, P protein, and L protein can be responsible for expression and replication of the viral genome.

[0277] In one embodiment, the nucleic acid transcribed from the Sendai virus-derived construct plasmid in the producer cell is the loaded nucleic acid of the Sendai virus-derived construct. Therefore, the following characteristics relating to the Sendai virus-derived construct plasmid can also be characteristics of the loaded nucleic acid of the Sendai virus-derived construct.

[0278] In one embodiment, the Sendai virus-derived construct plasmid contains at least one of the nucleic acid sequences required to construct a Sendai virus-derived construct, and a desired gene. In one embodiment, the desired gene can be located upstream and/or downstream of any of the Sendai virus genes (N, P, M, F, HN, and L genes). In one embodiment, the Sendai virus-derived construct plasmid can contain an EIS sequence (transcription end (E) sequence-intervening (I) sequence-transcription start(S) sequence) upstream or downstream of the desired gene, thereby promoting the expression of the gene upstream or downstream of the desired gene. In one embodiment, the Sendai virus-derived construct plasmid can be modified to insert a sequence having a base number of a multiple of 6 (for example, a sequence containing a desired gene). In one embodiment, the Sendai virus-derived construct plasmid is configured to function in a producer cell so that the virus-derived construct plasmid and the producer cell contain the nucleic acid sequences required to construct a Sendai virus-derived construct. In one embodiment, one or a plurality (for example, all) of the genes or gene products thereof that are not contained in the virus-derived construct plasmid among the nucleic acid sequences required to construct a Sendai virus-derived construct can be supplied in producer cells in trans with the virus-derived construct plasmid.

[0279] In one embodiment, the nucleic acid sequence required to construct a Sendai virus-derived construct can be all genes of Sendai virus. In one embodiment, the Sendai virus-derived construct plasmid contains the nucleic acid sequence required to construct a Sendai virus-derived construct between LE and TR. In one embodiment, the nucleic acid sequence required to construct a Sendai virus-derived construct can contain N, P, V, C, M, F, HN, and L genes. In one embodiment, the nucleic acid sequence required to construct a Sendai virus-derived construct can be all genes of Sendai virus other than one or a plurality of M, F, and HN. When using Sendai virus-derived construct plasmid that is deficient in one or a plurality of M, F, and HN genes, the loaded nucleic acids can lose their transferability in the host. In one embodiment, the Sendai virus-derived construct plasmid may not contain one or a plurality of M, F, and HN and in one embodiment, the nucleic acid sequence required to construct a Sendai virus-derived construct contains these genes. In one embodiment, the Sendai virus-derived construct plasmid can contain a gene encoding an RNA polymerase of bacteriophage T7. In one embodiment, the Sendai virus-derived construct plasmid can contain a self-cleaving ribozyme Rbz.

[0280] In one embodiment, the Sendai virus gene may be modified to reduce the antigenicity of Sendai virus proteins or to increase RNA transcription and replication efficiency. In one embodiment, in order to enhance the function of transcription or replication, one or a plurality of N gene, P gene, and L gene, which are replication factors, may be modified. In one embodiment, HN protein, which is a structural protein, may be modified, such that the hemagglutinin activity and/or the neuraminidase activity can be changed, the hemagglutinin activity can be weakened to improve the stability of the virus in the blood, and the neuraminidase activity can be changed to change the infectivity of the virus. In one embodiment, F protein involved in membrane fusion may be modified. In one embodiment, V gene, which is an accessory gene, may be modified so as to be deleted. Examples of the producer cells for producing a Sendai virus-derived construct include cells such as BHK/T7.

### Measles Virus-Derived Construct

[0281] Measles virus is an RNA virus classified in the genus Paramyxoviridae. Measles virus, like Sendai virus, contains N, P, M, F, H, and L genes.

[0282] In one embodiment, the Measles virus-derived construct plasmid contains at least one of the nucleic acid sequences required to construct a Measles virus-derived construct, and a desired gene. In one embodiment, the desired gene can be located upstream and/or downstream of any of the Measles virus genes. In one embodiment, the Measles virus-derived construct plasmid is configured to function in a producer cell so that the virus-derived construct plasmid and the producer cell contain the nucleic acid sequences required to construct a Measles virus-derived construct. In one embodiment, one or a plurality (for example, all) of the genes or gene products thereof that are not contained in the virus-derived construct plasmid among the nucleic acid sequences required to construct a Measles virus-derived construct can be supplied in producer cells in trans with the virus-derived construct plasmid. In one embodiment, the nucleic acid sequence required to construct a Measles virus-derived construct can be all genes of Measles virus.

### Alphavirus-Derived Construct

[0283] As used herein, the term “alphavirus” refers to a virus in the genus Alphavirus in the family Togaviridae. An alphavirus is an enveloped RNA virus that can proliferate in the cytoplasm without passing through intermediates of DNA and infect various cells via a laminin receptor and the like. The genome of the alphavirus is a single-stranded messenger-sense RNA, and is modified at the 5′ end with a methylation cap and is modified at the 3′ end with a variable-length poly(A) tract Viral particles have a structure containing an RNA genome in an icosahedral nucleocapsid. The genome of the alphavirus contains genes encoding non-structural proteins of nsp1, nsp2, nsp3 and nsp4, and genes encoding structural proteins of capsid (C) protein and E1 and E2 glycoproteins. Examples of the alphavirus include Venezuelan equine encephalitis (VEE) virus, Semliki forest virus (SFV), Sindbis virus, Ross River virus, Western equine encephalitis virus, Eastern equine encephalitis virus, Chikungunya virus, S.A.AR86, Everglades virus, Mucambo Virus, Barmah forest virus, Middelburg virus, Pixuna virus, O'nyong'nyong virus, Getah virus, Sagiyama virus, Beval virus, Mayaro virus, Una virus, Aura virus, Whataroa virus, Babanki virus, Kyzylagach virus, Highlands J virus, Fort Morgan virus, Ndumu virus, and Buggy Creek virus.

[0284] In one embodiment, the alphavirus-derived construct plasmid contains at least one of the nucleic acid sequences required to construct an alphavirus-derived construct, and a desired gene. In one embodiment, the desired gene may be located between any of nsp1, nsp2, nsp3, and nsp4. In one embodiment, the alphavirus-derived construct plasmid is configured to function in a producer cell so that the virus-derived construct plasmid and the producer cell contain the nucleic acid sequences required to construct an alphavirus-derived construct. In one embodiment, one or a plurality (for example, all) of the genes or gene products thereof that are not contained in the virus-derived construct plasmid among the nucleic acid sequences required to construct an alphavirus-derived construct can be supplied in producer cells in trans with the virus-derived construct plasmid. For example, the gene not contained in the virus-derived construct plasmid may be encoded by the chromosome of the producer cell, or may be encoded by another nucleic acid molecule (for example, a plasmid) to be introduced into the producer cell, or a gene product (which may be in the form of a viral particle) of the gene not contained in the virus-derived construct plasmid may be introduced into the producer cell. In one embodiment, a nucleic acid molecule other than the virus-derived construct plasmid of the present disclosure introduced into the producer cells may be deficient in one or a plurality of a 5′ alphavirus replication recognition sequence and a 3′ alphavirus replication recognition sequence, and it can be avoided that the loaded nucleic acid contains a nucleic acid derived from this nucleic acid.

[0285] In one embodiment, the nucleic acid sequence required to construct an alphavirus-derived construct can be all genes of the alphavirus. In one embodiment, the alphavirus-derived construct plasmid may not contain one or a plurality of alphavirus genes other than the 5′ alphavirus replication recognition sequence, nsp1, nsp2, nsp3, nsp4, and the 3′ alphavirus replication recognition sequence, and in one embodiment, the nucleic acid sequences required to construct an alphavirus-derived construct contain these genes.

### Rabies Virus-Derived Construct

[0286] A rabies virus is a negative-stranded single-stranded RNA virus of the genus Lyssavirus in the family Rhabdoviridae, and the viral particles are bullet-shaped and cylindrical. The cylinder has a length of about 180 nm and a diameter of about 75 nm. The viral particle contains five genes encoding L (large protein), G (glycoprotein), N (nucleoprotein), P (phosphoprotein), and M (matrix protein). Among them, G protein may be associated with infectivity. In the genome of the rabies virus, genes are arranged in the order of N, P, M, G, and L from the leader site. The expression level can increase as the gene is closer to the leader site.

[0287] In one embodiment, the rabies virus-derived construct plasmid contains at least one of the nucleic acid sequences required to construct a rabies virus-derived construct, and a desired gene. In one embodiment, the desired gene can be located upstream and/or downstream of any of N, P, M, G, and L genes. In one embodiment, the rabies virus-derived construct plasmid is configured to function in a producer cell so that the virus-derived construct plasmid and the producer cell contain the nucleic acid sequences required to construct a rabies virus-derived construct. In one embodiment, one or a plurality (for example, all) of the genes or gene products thereof that are not contained in the virus-derived construct plasmid among the nucleic acid sequences required to construct a rabies virus-derived construct can be supplied in producer cells in trans with the virus-derived construct plasmid. In one embodiment, the nucleic acid sequences required to construct a rabies virus-derived construct may be all genes of the rabies virus. In one embodiment, the rabies virus-derived construct plasmid may not contain one or more of N, P, M, G, and L.

### Vesicular Stomatitis Virus-Derived Construct

[0288] Vesicular stomatitis virus (VSV) is an RNA virus belonging to the genus Vesiculovirus in the family Rhabdoviridae, and retains a negative single-stranded RNA genome of about 11 kb. The vesicular stomatitis virus (VSV) contains five genes encoding L (large protein), G (glycoprotein), N (nucleoprotein), P (phosphoprotein), and M (matrix protein), similar to the rabies virus.

[0289] In one embodiment, a VSV-derived construct plasmid contains at least one of the nucleic acid sequences required to construct a VSV-derived construct, and a desired gene. In one embodiment, the desired gene can be located upstream and/or downstream of any of N, P, M, G, and L genes. In one embodiment, the VSV-derived construct plasmid is configured to function in a producer cell so that the virus-derived construct plasmid and the producer cell contain the nucleic acid sequences required to construct a VSV-derived construct. In one embodiment, one or a plurality (for example, all) of the genes or gene products thereof that are not contained in the virus-derived construct plasmid among the nucleic acid sequences required to construct a VSV-derived construct can be supplied in producer cells in trans with the virus-derived construct plasmid. In one embodiment, the nucleic acid sequence required to construct a VSV-derived construct can be all genes of VSV. In one embodiment, the VSV-derived construct plasmid may not contain one or more of N, P, M, G, and L.

### Coronavirus-Derived Construct

[0290] A viral particle of a virus belonging to the family Coronavirus (CoV) shows a circle (spherical shape) having a diameter of about 80 to 100 nm, and in an envelope enclosing a nucleocapsid, a spike(S) protein, a membrane integral (M) protein, and an envelope (E) protein are present. In the genome of CoV, genes encoding 1a and 1b non-structural proteins from a 5′ side, which are about 30 kb of (+) strand RNAs, and S, E, M, and N gene, which are structural genes located downstream thereof, are present, and genes of some non-structural proteins in the region immediately below S gene are present.

[0291] In one embodiment, the coronavirus-derived construct plasmid contains at least one of the nucleic acid sequences required to construct a coronavirus-derived construct, and a desired gene. In one embodiment, the coronavirus-derived construct plasmid of the present disclosure contains a desired gene between a 5′ ITR and a 3′ ITR. In one embodiment, the coronavirus-derived construct plasmid is configured to function in a producer cell so that the virus-derived construct plasmid and the producer cell contain the nucleic acid sequences required to construct a coronavirus-derived construct. In one embodiment, one or a plurality (for example, all) of the genes or gene products thereof that are not contained in the virus-derived construct plasmid among the nucleic acid sequences required to construct a coronavirus-derived construct can be supplied in producer cells in trans with the virus-derived construct plasmid.

[0292] In one embodiment, the nucleic acid sequences required to construct a coronavirus-derived construct may be all genes of the coronavirus. In one embodiment, the coronavirus-derived construct plasmid may not contain one or a plurality of coronavirus genes other than 1a and 1b, and in one embodiment, the nucleic acid sequence required to construct a coronavirus-derived construct contains these genes.

### Influenza Virus-Derived Construct

[0293] An influenza virus is an enveloped virus having a negative-stranded RNA genome belonging to the family Orthomyxoviridae. The genome of Type A influenza virus is segmented into 8 segments, and encodes 11 types of proteins (PB1, PB2, PA, HA, NA, M1, M2, NS1, NS2/NEP, and NP). The 5′-terminal untranslated region, the 3′-terminal untranslated region, and both ends of the translated region of the influenza virus RNA can be packaging sequences.

[0294] In one embodiment, influenza virus-derived construct plasmid can contain a 5′-terminal untranslated region of the segmented influenza virus RNA, a 5′-end of the translated region, a desired gene, a 3′-end of the translated region, and a 3′-terminal untranslated region. Here, the genes of the influenza virus may be removed or maintained. In one embodiment, the retrovirus-derived construct plasmid may contain nucleic acid sequences required to construct an influenza virus. In one embodiment, the nucleic acid sequences required to construct an influenza virus can be PB1, PB2, PA, HA, NA, M1, M2, NS1, NS2/NEP and NP. In one embodiment, the influenza virus-derived construct plasmid is configured to function in a producer cell so that the virus-derived construct plasmid and the producer cell contain the nucleic acid sequences required to construct an influenza virus-derived construct. In one embodiment, one or a plurality (for example, all) of the genes or gene products thereof that are not contained in the virus-derived construct plasmid among the nucleic acid sequences required to construct an influenza virus-derived construct can be supplied in producer cells in trans with the virus-derived construct plasmid.

### Vaccinia Virus-Derived Construct

[0295] Vaccinia virus belongs to the family Poxviridae and is an enveloped virus containing a linear double-stranded DNA genome of about 190 Kbp. Vaccinia virus replicates only in the cytoplasm of a host cell. During viral DNA replication, vaccinia virus produces several infectious forms which differ in their outer membranes: intracellular mature virions (IMVs), intracellular enveloped virions (IEVs), cell-associated enveloped virions (CEVs), and extracellular enveloped virions (EEVs).

[0296] In one embodiment, a vaccinia virus-derived construct plasmid contains nucleic acid sequences required to construct a vaccinia virus-derived construct, and a desired gene. In one embodiment, the nucleic acid sequences required to construct a vaccinia virus-derived construct can encode DIR, D2L, D3R, DAR, D5R, D6R, D7R, D8L, D11L, and D13L genes. In one embodiment, the vaccinia virus-derived construct plasmid may be deficient in a gene encoding thymidine kinase. In one embodiment, a vaccinia virus-derived construct can be produced by introducing a virus-derived construct plasmid into a producer cell infected with a vaccinia virus and causing homologous recombination in the cells. The vaccinia virus-derived construct plasmid used in the embodiment contains nucleic acid sequences having homology to the desired gene and to any region of the genome of the vaccinia virus. In one embodiment, the vaccinia virus-derived construct plasmid can contain a desired gene between the vaccinia virus genome and any of the vaccinia virus genes.

### Reovirus-Derived Construct

[0297] A virus of the family Reoviridae is an RNA virus containing icosahedral virions having a diameter of about 60 to 80 nm, a genome of 10 to 12 linear double-stranded RNAs, and no envelope. Viruses of the family Reoviridae include a rotavirus, mammalian orthoreovirus (MRV), and the like. MRV is classified into four serotypes, MRV-1, MRV-2, MRV-3, and MRV-4. 10-segmented dsRNA genomes encode 8 structural proteins: λ1 (L3 gene), λ2 (L2 gene), λ3 (L1 gene), μ1 (M2 gene), μ2 (M1 gene), σ1 (S1 gene), σ2 (S2 gene), σ3 (S4 gene), and 4 non-structural proteins: μNS (M3 gene), μNSC (M3 gene), σNS (S3 gene), and σ1s (S1 gene). MRV is composed of capsids having a two-layer structure, the outer shell is composed of μ1, σ3, and σ1, and the inner shell (core structure) is composed of λ1, λ2, and σ2. The core particle contains λ3, which is an RNA-dependent RNA polymerase, and μ2, which is a polymerase cofactor, in addition to the 10-segmented genomes. The non-structural protein μNS plays a central role in the formation of VF, which is a field of replication, and binds to various MRV proteins and recruits them into VF. μNSCs may not be essential for replication in cultured cells. σNS interacts with μNS, has a high binding ability to a single-stranded RNA, and can be involved in recruitment of a positive-stranded viral RNA into VF. σ1s is not essential for virus replication, but may be involved in pathogenesis.

[0298] In one embodiment, a reovirus-derived construct plasmid contains at least one of the nucleic acid sequences required to construct a reovirus-derived construct, and a desired gene. In one embodiment, the nucleic acid sequence required to construct a reovirus-derived construct can contain L1, L2, L3, M1, M2, M3, S1, S2, S3, and S4 genes. In one embodiment, the reovirus-derived construct plasmid can contain L1, L2, L3, M1, M2, M3, S1, S2, S3, and S4 genes. In one embodiment, the reovirus-derived construct plasmid may not encode at least one of μNSC and σ1s. In one embodiment, the reovirus-derived construct plasmid is configured to function in a producer cell so that the virus-derived construct plasmid and the producer cell contain the nucleic acid sequences required to construct a reovirus-derived construct. In one embodiment, one or a plurality (for example, all) of the genes or gene products thereof that are not contained in the virus-derived construct plasmid among the nucleic acid sequences required to construct a reovirus-derived construct can be supplied in producer cells in trans with the virus-derived construct plasmid. In one embodiment, the nucleic acid sequence required to construct a reovirus-derived construct can be all genes of reovirus. In one embodiment, the reovirus-derived construct plasmid may not contain one or a plurality of L1, L2, L3, M1, M2, M3, S1, S2, S3, and S4. Examples of the producer cells for producing a reovirus-derived construct include cells such as L929.

### Coxsackievirus-Derived Construct

[0299] A coxsackie virus is a non-enveloped, linear, single-stranded, positive-stranded RNA virus belonging to the genus Enterovirus in the family Picornaviridae. The coxsackie virus, which is an enterovirus, is composed of genes VP0 (VP4 and VP2), VP3, VP1, 2A, 2B, 2C, 3A, 3B, 3C, and 3D from 5′ to 3′, VP gene encodes a capsid, and the other genes encode non-structural proteins. VP4 behaves like the amino terminus of VP2.

[0300] In one embodiment, a coxsackie virus-derived construct plasmid contains at least one of the nucleic acid sequences required to construct a coxsackie virus-derived construct, and a desired gene. In one embodiment, the desired gene can be located upstream and/or downstream of any of VP0, VP3, VP1, 2A, 2B, 2C, 3A, 3B, 3C, and 3D genes. In one embodiment, the coxsackie virus-derived construct plasmid is configured to function in a producer cell so that the virus-derived construct plasmid and the producer cell contain the nucleic acid sequences required to construct a coxsackie virus-derived construct. In one embodiment, one or a plurality (for example, all) of the genes or gene products thereof that are not contained in the virus-derived construct plasmid among the nucleic acid sequences required to construct a coxsackie virus-derived construct can be supplied in producer cells in trans with the virus-derived construct plasmid. In one embodiment, the nucleic acid sequences required to construct a coxsackie virus-derived construct may be all genes of the coxsackie virus. In one embodiment, the nucleic acid sequences required to construct a coxsackie virus-derived construct may be 2A, 2B, 2C, 3A, 3B, 3C, 3D, VP1, VP2, VP3, and VP4. In one embodiment, the coxsackie virus-derived construct plasmid may not contain one or a plurality of VP0, VP3, VP1, 2A, 2B, 2C, 3A, 3B, 3C, and 3D. Examples of the producer cells for producing a coxsackie virus-derived construct include cells such as H1299 and HeLa.

### Newcastle Disease Virus-Derived Construct

[0301] Newcastle disease virus (NDV) is an enveloped linear, negative single-stranded RNA virus classified into the family Paramyxoviridae. From 3′ to 5′, the genomic RNA of NDV contains the genes for nucleocapsid protein (NP), phosphoprotein (P), matrix protein (M), fusion protein (F), hemagglutinin-neuraminidase (HN), and large protein (L). The genomic RNA also contains a leader sequence at the 3′ end. Fusion protein (F) is an integral membrane protein that is activated to promote fusion of the viral envelope with the host cell membrane. Matrix protein (M) is involved in a viral construct and interacts with viral membranes and nucleocapsid proteins. Nucleocapsid protein (NP) is the main protein of nucleocapsid and associates with phosphoprotein (P) and large protein (L). Phosphoprotein (P) undergoes phosphorylation and can be involved in transcriptional regulation, methylation, phosphorylation, and polyadenylation. Large protein (L) gene encodes an RNA-dependent RNA polymerase and is required for viral RNA synthesis along with P protein.

[0302] In one embodiment, an NDV-derived construct plasmid contains at least one of the nucleic acid sequences required to construct an NDV-derived construct, and a desired gene. In one embodiment, the desired gene can be located upstream and/or downstream of any of NP, P, M, F, HN, and L genes. In one embodiment, the NDV-derived construct plasmid is configured to function in a producer cell so that the virus-derived construct plasmid and the producer cell contain the nucleic acid sequences required to construct an NDV-derived construct. In one embodiment, one or a plurality (for example, all) of the genes or gene products thereof that are not contained in the virus-derived construct plasmid among the nucleic acid sequences required to construct an NDV-derived construct can be supplied in producer cells in trans with the virus-derived construct plasmid. In one embodiment, the nucleic acid sequence required to construct an NDV-derived construct can be all genes of NDV. In one embodiment, the NDV-derived construct plasmid may not contain one or more of NP, P, M, F, HN, and L.

[0303] In one embodiment, the present disclosure provides a virus-derived construct-containing composition containing a population of virus-derived constructs of the present disclosure. In one embodiment, the virus-derived construct-containing composition may have a viral vector particle number with respect to a viral vector genome copy number (VP/VG) of 35, 30, 25, 20, 15, 10, or 5 or less.

[0304] In one embodiment, the virus-derived construct plasmids produced from packaging cells can be purified using any known method, and the present disclosure also provides the thus purified virus-derived construct plasmids. In one embodiment, the purified virus-derived construct plasmids containing a desired nucleic acid sequence can be confirmed by examining the size pattern of fragments generated by restriction enzyme cleavage, a PCR method, a base sequencing method, or the like. In one embodiment, the virus-derived construct plasmid-containing composition prepared by the method for producing virus-derived construct plasmids of the present disclosure may contain trace endotoxins. In one embodiment, there is provided Bacillus subtilis containing the virus-derived construct plasmids of the present disclosure.

### (Composition)

[0305] In one embodiment, the present disclosure provides a composition containing the virus-derived construct plasmids or virus-derived constructs described As used herein. The virus-derived construct of the present disclosure, the virus-derived construct library, and the virus-derived construct-containing composition of the present disclosure produced by the method of the present disclosure can have structural characteristics that are not fully analyzable or significantly difficult to analyze, such as in the conformation or surface modification of the virus-derived construct. Therefore, the characteristic of being produced by the method of the present disclosure is one of the characteristics of appropriately expressing the virus-derived construct, the virus-derived construct library, and the virus-derived construct-containing composition of the present disclosure.

### (Formulation and the Like)

[0306] The composition described As used herein can be provided in a variety of forms. The form of the composition may be, for example, an injection, a capsule, a tablet, a granule, an inhalant, or the like. An aqueous solution for injection may be stored, for example, in a vial or in a stainless container. In addition, the aqueous solution for injection may contain, for example, physiological saline, sugar (for example, trehalose), NaCl, NaOH, or the like.

[0307] In one embodiment, the composition of the present disclosure contains a pharmaceutically acceptable carrier or excipient. Such a carrier can be an aseptic liquid, for example, water or oil, includes a carrier derived from petroleum, an animal, a plant, or a synthetic origin, and includes, but is not limited to, peanut oil, soybean oil, mineral oil, sesame oil, and the like. When a medicine is orally administered, water is a preferred carrier. When the pharmaceutical composition is administered intravenously, saline and aqueous dextrose are preferred carriers. Preferably, an aqueous saline solution, and aqueous dextrose and a glycerol solution are used as a liquid carrier for an injectable solution. Examples of a preferred excipient include light anhydrous silicic acid, crystalline cellulose, mannitol, starch, glucose, lactose, sucrose, gelatin, malt, rice, wheat flour, chalk, silica gel, sodium stearate, glycerol monostearate, talc, sodium chloride, powdered skim milk, glycerol, propylene, glycol, water, ethanol, Carmellose calcium, Carmellose sodium, hydroxypropyl cellulose, hydroxypropyl methylcellulose, polyvinyl acetal diethylamino acetate, polyvinylpyrrolidone, gelatin, medium-chain fatty acid triglyceride, polyoxyethylene hydrogenated castor oil 60, poloxamer, saccharose, carboxymethylcellulose, corn starch, and an inorganic salt. The composition can contain a small amount of a wetting agent or an emulsifier, or a pH buffer, if desired. These compositions can be in the form of a solution, suspension, emulsion, tablet, pill, capsule, powder, sustained release mixture, or the like. The composition can also be formulated as a suppository using a traditional binding agent and carrier, for example, triglyceride. Oral formulation can also contain a standard carrier such as medicine grade mannitol, lactose, starch, magnesium stearate, sodium saccharin, cellulose, or magnesium carbonate. Examples of a preferred carrier are described in E. W. Martin, Remington's Pharmaceutical Sciences (Mark Publishing Company, Easton, U.S.A). In addition, for example, a surfactant, an excipient, a coloring agent, a flavoring agent, a preservative, a stabilizer, a buffer, a suspension, an isotonizing agent, a binder, a disintegrant, a lubricant, a fluidity accelerator, a corrigent, or the like may be contained. In one embodiment, the pH of any liquid composition of the present disclosure can be about 3, about 3.5, about 4, about 4.5, about 5, about 5.5, about 6, about 6.5, about 7, about 7.5, about 8, about 8.5, about 9, about 9.5, about 10, about 10.5, about 11, or a range between any two of these values.

[0308] The optional ingredient of the composition of the present disclosure can be provided as a pharmaceutically acceptable salt, and can be, for example, a salt formed with a free carboxyl group derived from hydrochloric acid, phosphoric acid, acetic acid, oxalic acid, tartaric acid, or the like, a salt formed with a free amine group derived from isopropylamine, triethylamine, 2-ethylaminoethanol, histidine, procaine, or the like, and a salt derived from sodium, potassium, ammonium, calcium, ferric hydroxide, or the like.

[0309] In a preferred embodiment, a composition can be formulated as a pharmaceutical composition adapted for administration to humans according to a known method. Such a composition can be administered by injection. A composition for use in injection administration is typically a solution in an aseptic isotonic aqueous buffer. The composition can also contain a solubilizing agent and a local anesthetic agent such as lidocaine which alleviates the pain at the site of injection as necessary. In general, the ingredients can be supplied separately or mixed and supplied together in a unit dosage form, and supplied as a lyophilized powder or water free concentrate, for example, in a sealed container such as an ampoule or sachet showing the amount of active agent. When the composition is to be administered by injection, the composition can be distributed by using an injection bottle containing aseptic agent-grade water or saline. When the composition is to be administered by injection, aseptic water or saline ampoule for injection can also be provided so that the ingredients can be mixed prior to administration.

### (Use and Application)

[0310] The virus-derived construct plasmid or virus-derived construct described As used herein, or a composition containing the same, can be used in a variety of applications, such as gene therapy, functional genomics, cancer vaccination, and/or antiviral vaccination.

[0311] When the virus-derived construct or the virus-derived construct-containing composition of the present disclosure is applied to a subject, the subject is not particularly limited, and may be a mammal (for example, a mouse, a rat, a hamster, a rabbit, a cat, a dog, a cow, sheep, a pig, a monkey, a human, or the like), a bird, a reptile, an amphibian, an arthropod, a fish, or the like.

[0312] The amount of the virus-derived construct or the virus-derived construct-containing composition of the present disclosure can vary depending on the nature of the disorder or condition to be treated or prevented, and can be determined by those skilled in the art by a standard clinical technique based on the descriptions As used herein. An in vitro assay can be used in some cases to assist the identification of the optimal dosing range. The precise dose to be used in a formulation can also vary depending on the administration route or the severity of the disease or disorder. Thus, the dose should be determined in accordance with the judgment of the attending physician or the condition of each patient. A dosage of the virus-derived construct or the virus-derived construct-containing composition of the present disclosure is not particularly limited, and may be, for example, 1×10⁵, 1×10⁶, 1×10⁷, 1×10⁸, 1×10⁹, 1×10¹⁰, 1×10¹¹, 1×10¹², 1×10¹³, 1×10¹⁴, or 1×10¹⁵ virus-derived constructs per dose, and may be within a range of any two of these values. The dosing interval is not particularly limited, and may be, for example, 1 or 2 administrations every 1, 7, 14, 21, or 28 days or 1 or 2 administrations per range of any two of these values. The dosage, dosing interval, and dosing method may be appropriately selected depending on the age, weight, symptom, target organ, or the like of the patient.

[0313] The administration route of the virus-derived construct or the virus-derived construct-containing composition described As used herein may be, for example, intravenous, intradermal, subcutaneous, intramuscular, intraperitoneal, intrathecal, intraventricular, intraparenchymal, pulmonary, intranasal, epidural, or oral administration. In one embodiment, the composition of the present disclosure can be used together with various delivery systems. Such systems include, for example, encapsulation in liposomes, microparticles, and microcapsules, the use of receptor-mediated endocytosis, and the like. It is also possible to administer the medicine by a suitable route, for example, by injection, bolus injection, or absorption through epithelial or mucocutaneous lining (for example, oral cavity, rectum, intestinal mucosa, or the like). In addition, an inhaler or nebulizer using an aerosolizing agent can be used as necessary. In addition, other drugs can also be administered together. The administration can also be systemic or local.

[0314] The composition of the present disclosure can be provided as a kit. In one embodiment, the present disclosure provides a kit for producing a virus-derived construct, the kit containing the virus-derived construct plasmids of the present disclosure. In one embodiment, the present disclosure provides a drug pack or kit including one or more containers filled with one or more components that can be added to the composition of the present disclosure. In some cases, information indicating approval of manufacture, use, or sale for administration to humans by a government agency regulating the manufacture, use, or sale of medicines or biological products in a stipulated form can be appended to such a container.

[0315] The formulation procedure for the composition of the present disclosure as a medicine or the like is known in the art, and is described, for example, in the Japanese Pharmacopoeia, the United States Pharmacopeia, pharmacopeia of other countries, or the like. Accordingly, those skilled in the art can determine the embodiment, such as the amount to be used, without undue experimentation from the descriptions As used herein.

[0316] As used herein, “or” is used when “at least one or more” of the items listed in the text can be employed. The same applies to “or”. When explicitly described As used herein as “within the range” of “two values”, the range also includes the two values themselves.

[0317] Reference literatures such as scientific literatures, patents, and patent applications cited As used herein are incorporated herein by reference to the same extent that the entirety of each document is specifically described.

[0318] The present disclosure has been described above with reference to preferred embodiments for easy understanding. Hereinafter, the present disclosure will be described based on examples, but the above description and the following examples are provided for the purpose of illustration only and not for the purpose of limiting the present disclosure. Accordingly, the scope of the present disclosure is not limited to the embodiments or examples specifically described As used herein, but is limited only by the claims.

### EXAMPLES

[0319] For reagents, the specific products described in the Examples were used. However, the reagent can be substituted with an equivalent product from another manufacturer (Sigma-Aldrich, Wako Pure Chemical Industries, Ltd., Nacalai Tesque INC., R&D Systems, USCN Life Science INC, or the like).

### Medium

[0320] LB medium was prepared by dissolving 10 g of Bactotryptone, 5 g of a yeast extract, and 5 g of sodium chloride in 1 L of water, and when preparing an agar plate, further adding 15 g of Bacto Agar, and performing autoclaving (121° C., 20 minutes). Carbenicillin (final concentration: 100 μg/mL) or tetracycline (final concentration: 10 μg/mL) was added thereto and used as necessary. TF-I medium and TF-II medium for Bacillus subtilis transformation were prepared as follows. First, 10× Spizizen (140 g K₂HPO₄ (anhydrous), 60 g KH₂PO₄ (anhydrous), 20 g (NH₄)₂SO₄ per 1 L), 10 g Na₃-citric acid·₂H₂O), 50% glucose, 2% MgSO₄·7H₂O, 2% casamino acid, and water were individually prepared by autoclaving. In addition, an aqueous solution (5 mg/mL) of each amino acid of tryptophan, arginine, leucine, and threonine was prepared by filter sterilization. 50 mL of 10× Spizizen, 5 mL of each of 50% glucose, 2% MgSO₄·7H₂O, 2% casamino acid, and 5 mg/mL of each amino of tryptophan, arginine, leucine, and threonine, and finally 415 mL of sterile water were mixed and filtered through a filter to prepare TF-I medium (500 mL), and the TF-I medium was stored at 4° C. until use. TF-II medium (500 mL) was prepared by filter filtration using the same medium as the TF-I medium except that 2.5 mL of 2% casamino acid, 0.5 mL of each amino acid solution (5 mg/mL), and 435.5 mL of sterile water were used, and the medium was stored at 4° C. until use.

### In Vitro Gene Manipulation

[0321] Other common DNA manipulations were performed according to standard protocols (Sambrook, J., et al., Molecular Cloning: A Laboratory Manual. Cold Spring Harbor Laboratory Press, Cold Spring Harbor, New York (1989)).

Bacillus subtilis Transformation Method

[0322] 2 mL of LB medium was placed in a 14 mL test tube (2051) of Falcon, and Bacillus subtilis in a glycerol stock stored at −70° C. was inoculated therein, and cultured at 37° C. for 17 hours while rotating by a rotary culture apparatus. 900 μL of TF-I medium was dispensed into a new 14 mL test tube (Falcon 2051), 25 μL of 2% casamino acid was added, 50 μL of a preculture solution was added, and the cells were cultured at 37° C. for 4 hours while being rotated by the rotary culture apparatus. Thereafter, 900 μL of TF-II medium was dispensed into a new 14 mL test tube, 100 μL of TF-I culture solution was added thereto, and the cells were cultured at 37° C. for 1.5 hours while being rotated by the rotary culture apparatus. 100 μL of TF-II culture solution was placed in a 1.5 mL centrifuge tube, and 8 μL of DNA was added thereto. The cells were cultured at 37° C. for 30 minutes while being rotated by a rotary culture apparatus, 300 μL of LB medium was then added, and the cells were further cultured at 37° C. for 1 hour while being rotated by the rotary culture apparatus. Thereafter, the resultant was spread on an LB medium agar plate containing 10 μg/mL of tetracycline and incubated at 37° C. overnight to obtain a transformant.

### Mass Preparation of Plasmids by Ultracentrifugation

[0323] After completion of the culture, the cells were dispensed into four 50 mL tubes (Falcon 2070) by 50 mL, and centrifuged at 5,000×g for 10 minutes. The supernatant was discarded, and the bacterial pellets were completely loosened by vortexing. In the case of Escherichia coli, P1 Buffer (Qiagen N.V.) was used alone, and in the case of Bacillus subtilis, P1 Buffer (Qiagen N.V.) solution to which 10 mg/mL lysozyme and 10 mg/mL ribonuclease A were added was used, 5 mL of the solution was added to each of the four tubes containing bacteria by 5 mL, and mixing was performed well. The resultant was incubated at room temperature for 5 minutes. To each of the four tubes, 5 mL of P2 Buffer (Qiagen N.V.) was added and mixed slowly, and incubation was performed at room temperature for 5 minutes. Furthermore, P3 Buffer (Qiagen N.V.) was added by 5 mL, and mixing was performed with a strong force to some extent so that the cloudy substances were uniformly dispersed. Centrifugation was performed at 5,000×g for 10 minutes and the supernatant was pipetted and transferred to new four 50 mL screw-cap tubes (Falcon 2070). 5 mL of phenol saturated TE was added to each tube, and mixing was performed vigorously. Centrifugation was performed at 5,000×g for 10 minutes and the supernatant was pipetted and transferred to new four 50 mL screw-cap tubes (Falcon 2070). 100% ethanol was added by 20 mL and mixed, and the mixture was centrifuged at 5,000×g for 10 minutes to remove the supernatant. 5.4 mL of TE was added to the precipitate and completely dissolved. Next, 6.40 g of cesium chloride was charged and completely dissolved. Further, 2.6 mL of a 1.1 g/mL cesium chloride solution (solution prepared by mixing 1.1 g of cesium chloride and 1 mL of water, volume not adjusted) was added. Finally, 600 μL of 10 mg/mL an ethidium bromide solution was added and mixed well. The resultant was transferred to one ultracentrifuge tube (Beckman 362181). Water or a 1.1 g/mL cesium chloride solution (specific gravity: about 1.5 g/mL) was added to finely adjust the weight so that the difference in weight from the balance was within 20 mg. Centrifugation was performed using an ultracentrifuge (Beckman Coulter, Inc.) under the following conditions. Temperature: 18° C., speed: 50,000 rpm, acceleration: Max, deceleration: Max. The centrifugation was performed for 15 hours or longer.

[0324] After completion of the centrifugation, the resultant was inserted into a band of a ccc type plasmid with a 1 mL syringe set with a needle (21G× ⅝″) under observation with ultraviolet rays (365 nm), and the plasmid solution was recovered and transferred to a 15 mL tube. 500 μL of P3 was added thereto, and then, water was added so that the total volume was 3 mL. In addition, 9 mL of 100% ethanol was added. Centrifugation was performed at 5,000×g for 10 minutes, and the supernatant was removed. 700 μL of TE was added to the resulting precipitate to dissolve DNA. The resultant was transferred to a 1.5 mL tube, 600 μL of 1-butanol was added and mixed, the mixture was centrifuged at 20,000×g for about 10 seconds and separated into two layers, and the upper butanol layer was discarded. 600 μL of 1-butanol was newly added and mixed, the mixture was centrifuged at 20,000×g for about 10 seconds and separated into two layers, and the upper butanol layer was discarded. This operation was continued until the aqueous layer became 450 μL or less. When the aqueous layer became 450 μL or less, 50 μL of P3 Buffer (Qiagen N.V.) was added, 900 μL of ethanol was further added and mixed, and then, centrifugation was performed at 20,000×g for 10 minutes. The supernatant was removed, and the resulting pellet DNA was rinsed with 900 μL of 70% ethanol and then dissolved in 22 μL of TE.

### Example 1: Screening Using DNA Barcodes from Collectively Transfected all-In-One Library

### Design of Seed Plasmids for CombiOGAB Method

[0325] The All-in-One genome serving as a seed plasmid was designed to have a structure in which the rAAV region (reporter gene surrounded by two ITR sequences), the Helper region (VA, E4, and E2A), and the Rep/Cap region, which are usually separately loaded on three plasmid vectors, were linked together in this order (FIG. 1). Five types of seed plasmids #1 to #5 linking sequences from different serotypes of AAV (ITR and Rep genes) and different serotypes of adenovirus (Hepler region) were designed as shown in Table 1.

TABLE 1

| Seed plasmid | | | | |
|---|---|---|---|---|
| No. | 5′ITR | 3′ITR | Helper | Rep |
| #1 | Improved AAV-2 | Improved AAV-2 | Ad-2C | Improved AAV-2 |
| #2 | AAV-1 | AAV-1 | Ad-12A | AAV-1 |
| #3 | AAV-2 | AAV-2 | Ad-14B | AAV-2 |
| #4 | AAV-3 | AAV-3 | Ad-5C | AAV-3 |
| #5 | AAV-4 | AAV-4 | Ad-8D | AAV-8 |

[0326] Here, for the reporter gene (EGFP) and the Cap gene (derived from Ad2), sequences common between seed plasmids were used. That is, the target of recombination by the combinatorial library by the CombiOGAB method is four portions of 5′ ITR, 3′ ITR, Helper, and Rep. A restriction enzyme SfiI recognition site (5′-GGCCnNNN/nGGCC-3′; n and N are any of A, T, G, and C; capital letters are 3′ end protrudings) was located at the boundary of each region. Each 3′ end protruding of the three bases generated when each SfiI recognition site is cleaved is the only sequence in the plasmid, as illustrated in FIG. 1. In the combinatorial library production by the CombiOGAB method, the order and direction of the adjacent DNA fragments are specified by the complementarity of the protruding portions. Thus, the seed plasmids were designed so that, for all types of seed plasmids, unit DNAs located at the same location had the same protruding sequence as illustrated in FIG. 2. Although some genes to be used may have SfiI recognition sequences naturally, the recognition sequences on the gene encoding the protein were replaced with synonymous codons and the recognition sequences on the non-coding region such as within the ITR sequence were changed in sequence to eliminate the SfiI recognition site.

[0327] In order to confirm what combinations of unit DNAs the rAAV vector plasmids produced from the All-in-One library have, a site where a DNA barcode with random sequences of 10 bases in the rAAV region can be introduced were designed. The specific sequences of the seed plasmids are set forth in SEQ ID NOs: 1 to 5.

### Preparation of Integrated Nucleic Acids for OGAB Method

[0328] In order to construct the designed seed plasmids by the OGAB method, 18 or 19 DNA fragments were designed, respectively (SEQ ID NOs: 6 to 98). Each material DNA was basically chemically synthesized and then prepared by the MAP method (JP 2019-198236 A) except that the sequence of the portion of the seed plasmid #1 was obtained by PCR.

Cloning of Integrated Fragment for OGAB into Vector

[0329] The resulting DNA fragments were purified using MinElute PCR Purification Kit (Qiagen N.V.), and finally eluted from the column with 15 μL of TE buffer (Nacalai Tesque INC.). To 1.4 μL of the resulting DNA solution, 0.2 μL of 10× Ex-Taq buffer (Takara Bio Inc.), 0.2 μL of 2 mM dNTP (Takara Bio Inc.), and 0.2 μL of 10× A-attachment mix (Toyobo Co., Ltd.) were added, and the mixture was reacted at 60° C. for 1 hour. Thereafter, 0.5 μL of fragments of 4.3 kb obtained by cleaving with 6 ng/μL of pBR-delTypeIIS-3-AarI (SEQ ID NO: 99) AarI, and 2.5 μL of DNA Ligation Kit <Mighty Mix> were added thereto, a ligation reaction was performed at 16° C. for 3 hours, and transformation was performed using Escherichia coli JM109 competent cells (Takara Bio Inc.). After overnight culture, the base sequences of the colonies that appeared on an LB plate containing carbenicillin were confirmed, and a clone having a correct sequence for each fragment was obtained.

[0330] Preparation of equimolar mixture of DNA fragments for OGAB method Escherichia coli with these clones was cultured in 2 mL of LB medium, and plasmids were purified with automated system QIAcube by QIAcube by QIAprep Spin Miniprep Kit (Qiagen N.V.) and finally eluted into 30 μL of TE buffer. TE buffer was added so that a solution containing 3 μg of plasmid DNAs among them was 50 μL. Further, 6 μL of 10× Plasmid safe buffer (epicentre), 2.4 μL of 25 mM ATP, and 2 μL of Plasmid-Safe ATP-Dependent DNase (Lucigen) were added thereto, and the mixture was reacted at 37° C. for 1 hour and then deactivated at 70° C. for 30 minutes to decompose DNA having a structure other than a circular structure. Thereafter, the reaction solution was purified using MinElute PCR Purification Kit (Qiagen N.V.) and finally eluted from the column with 15 μL of TE buffer (Nacalai Tesque INC.). The resulting DNA solution was measured using a microspectrophotometer (Nano drop One, Thermo Fisher Scientific Inc.), and diluted by adding TE buffer so as to be 100 ng/μL. Thereafter, the concentration was measured again, and the volume required to fractionate exactly 500 ng of DNA was calculated to two decimal places in μL, and fractionated with a micropipette to adjust each plasmid to be equimolar. The fractionated DNA solutions were pooled in two or three 1.5 mL centrifuge tubes depending on the type of restriction enzyme to be subsequently used (Table A).

[0331] Thereafter, 1.94 volumes of sterilized water, 0.33 volumes of 10× Buffer AarI (Thermo Fisher Scientific Inc.), 0.06 volumes of 50× oligonucleotide (0.025 mM), and 0.17 volumes of AarI (Thermo Fisher Scientific Inc.) were added to the tube for cleavage with AarI when the total volume of the plasmid solution was 1 volume, and the mixture was reacted at 37° C. for 2 hours. To the tube for cleavage with BsaI, 2 volumes of sterile water, 0.33 volumes of 10× CutSmart buffer (NEB), and 0.17 volumes of BsaI-HFv2 were added when the total volume of the plasmid solution was 1 volume, and the mixture was reacted at 37° C. for 2 hours. An equal amount of TE saturated phenol to the restriction enzyme reaction solution was added to each tube, and the mixture was well mixed to deactivate the restriction enzyme. Then, the mixture of the phenol and the DNA solution in the emulsified state was integrated into one 2 mL centrifuge tube, and centrifuged at 20,000×g for 10 minutes to separate the phenol phase and the aqueous phase. The upper layer was transferred to a new tube, into which an equal amount of 1-butanol was added, and the mixture was well stirred and centrifuged at 20,000×g for 1 minute. Thereafter, the upper layer was removed by suction with a pipette, an equal amount of 1-butanol was added again, centrifugation was performed, and the upper layer was discarded until the volume of the lower layer became 450 μL or less. Thereafter, 50 μL of P3 buffer and 900 μL of ethanol were added, and the mixture was centrifuged at 20,000×g for 10 minutes. The supernatant was discarded so as not to lose the precipitate and then rinsed with 900 μL of 70% ethanol, and the supernatant was sucked with a pipette and discarded. Thereafter, the mixture was centrifuged again, the remaining supernatant was collected at the bottom, and the liquid was completely removed with a pipette. Immediately, 50 μL of TE was added, and the precipitate was completely dissolved by tapping for 5 minutes. Thereafter, an equimolar mixture of 18 or 19 types of fragments of about 600 to 900 bp cut out from pBR-delTypeIIS-3-AarI was size-fractionated by electrophoresis with a low melting point agarose gel, and a mixture of 18 or 19 types of fragments was purified according to the method for cutting and purifying DNA fragments from an electrophoresis gel described in (WO 2020/203496 A).

### Preparation of Fragments for OGAB Integration

[0332] Plasmid pGETS118-AarI (Tsuge et al., Scientific Reports, 5, 10655) was cleaved with restriction enzyme AarI and size-fractionated by low melting point agarose gel electrophoresis, and large fragments of 15 kb were cut out from gel and purified to obtain fragments for OGAB integration.

### Plasmid Formation by OGAB Method

[0333] TE buffer was added to a mixed solution (10 fmol) of the resulting 18 or 19 DNA fragments and the fragments for OGAB integration (10 fmol) so that the total amount was 4 μL, and 5 μL of 2× ligation buffer (15% polyethylene glycol 6000, 500 mM NaCl, 132 mM Tris. HCl (pH 7.6), 13.2 mM MgCl₂, 20 mM DTT, 0.2 mM ATP) was added thereto. Then, the mixture was well mixed, 1 μL of T4 DNA Ligase (Takara Bio Inc.) was added, and the mixture was incubated at 37° C. for 5 hours, thereby preparing transforming DNA linked in tandem repeats. 100 μL of competent cells of Bacillus subtilis were added thereto, and the mixture was subjected to rotary culture at 37° C. for 30 minutes using a duck rotor. Thereafter, 300 μL of LB medium was added, and rotary culture was performed at 37° C. for 1 hour with a duck rotor. Thereafter, the culture solution was spread on an LB plate containing 10 μg/mL of tetracycline (Sigma-Aldrich), and culture was performed overnight at 37° C. to obtain candidate transformants of the seed plasmids.

### Confirmation of Plasmid Structure of Transformant

[0334] 12 colonies were randomly selected from the resulting candidate transformants and cultured overnight in 2 mL of LB medium containing 10 μg/mL of tetracycline, and in order to amplify the number of copies of the plasmids, IPTG was added so that a final concentration was 1 mM, and culture was further performed at 37° C. for 3 hours. A small amount of plasmids was extracted from the resulting bacterial cells by the following procedure. 900 μL of the bacterial solution was placed in a 1.5 mL centrifuge tube and centrifuged at 6,800×g for 3 minutes, and the supernatant was removed with a micropipette. The resulting cell pellets were well suspended, 100 μL of P1 buffer containing 10 mg/mL of egg white lysozyme (Wako Pure Chemical Industries, Ltd.) was added, and then the cell pellets were incubated at 37° C. for 5 minutes. Then, 200 μL of P2 buffer was added and mixed by inversion 4 times. Thereafter, 150 μL of P3 was added, and mixing was performed by inversion 4 times. The resultant was centrifuged at 20,000×g for 10 minutes to separate into a white precipitate and a supernatant. The supernatant was transferred to a new 1.5 mL centrifuge tube, into which 450 μL of TE saturated phenol (Nacalai Tesque INC.) was added, and mixed well. Then, the mixture was centrifuged at 20,000×g for 10 minutes to separate into a phenol phase and an aqueous phase, 320 μL of the aqueous phase was transferred to a new tube, into which 900 μL of ethanol was added, and the mixture was centrifuged at 20,000×g for 10 minutes. The supernatant was removed with a micropipette, 900 μL of 70% ethanol was added, and the entire tube was rinsed. Thereafter, 70% ethanol was removed with a micropipette, and the resulting precipitate was dissolved in 27 μL of TE buffer. 8 μL of the resulting plasmid solution was taken, 1 μL of 10×3.1 NEB buffer (NEB) and 1 μL of a restriction enzyme appropriate for confirming the structure of each seed plasmid were added thereto, the mixture was reacted at 37° C. for 1 hour, and the cleavage pattern was confirmed by agarose gel electrophoresis, thereby obtaining one clone matching the assumed restriction enzyme cleavage pattern for each seed plasmid. These plasmids were fragmented with Illumina prep (Illumina, Inc.) and the MiSeq (Illumina, Inc.) entire base sequence was determined to obtain clones in which each seed plasmid was correctly integrated.

### Seed Plasmid Mass Preparation Method

[0335] High purity plasmid DNAs were prepared by cesium chloride-ethidium bromide density gradient ultracentrifugation. 200 mL of a mixture obtained by adding tetracycline to LB medium so as to be 10 μg/mL was prepared, 100 mL of the mixture was added to a 500 mL Erlenmeyer flask to inoculate Bacillus subtilis plasmid-retaining strain, and culture was performed at 37° C. for 16 hours. Thereafter, IPTG was added so as to be 1 mM, culture was further performed for 1 day to increase the number of copies of the plasmids, and then the plasmid was purified by ultracentrifugation.

### Preparation of DNA Barcode Fragment

[0336] At the time of synthesis, 10 μL of 10×ExTaq Buffer (Takara Bio Inc.), 10 μL of a 2.5 mM dNTP solution (Takara Bio Inc.), and 2 μL of ExTaq polymerase (Takara Bio Inc.) were added to 88 μL of an aqueous solution containing 1 nmol of chemically synthesized DNA (SEQ ID NO: 100) containing a random sequence synthesized by continuously introducing 10 bases of N (base of any of A, T, G, and C) and 1 nmol of primer DNA (SEQ ID NO: 101) hybridizing with the 3′ end of the DNA, and then, the mixture was denatured at 99° C. for 10 minutes by a PCR apparatus and then reacted at 58° C. for 1 minute and 72° C. for 20 minutes. The reactant was purified by MiniElute PCR Purification Kit to obtain DNA fragments dissolved in 15 μL of TE. 9 μL of water, 3 μL of 10× CutSmart Buffer, and 3 μL of DraIII-HF were added thereto, and reacted at 37° C. for 30 minutes, and then, the reactant was purified again by MiniElute PCR Purification Kit to obtain DNA barcode fragments dissolved in 15 μL of TE.

### CombiOGAB Library

[0337] 1 μg of five types of seed plasmids obtained by mass preparation were mixed, and water was added so as to be 85 μL, 10 μL of 10× CutSmart buffer (NEB) and 5 μL of restriction enzyme SfiI were added, and then, the mixture was reacted at 50° C. for 1 hour. After completion of the reaction, 600 μL of water and 500 μL of TE saturated phenol (Nacalai Tesque INC.) were added, and then the mixture was mixed. Then, the mixture was separated into two phases by centrifugation at 20,000×g for 5 minute, the aqueous phase was transferred to a new 1.5 mL tube, 600 μL of 1-butanol was added and mixed, centrifugation was performed at 20,000×g for about 10 seconds, the mixture was separated into two layers, and the upper butanol layer was discarded. 600 μL of 1-butanol was newly added and mixed, the mixture was centrifuged at 20,000×g for about 10 seconds and separated into two layers, and the upper butanol layer was discarded. This operation was continued until the aqueous layer became 450 μL or less. When the aqueous layer became 450 μL or less, 50 μL of P3 Buffer (Qiagen N.V.) was added, 900 μL of ethanol was further added and mixed, and then, centrifugation was performed at 20,000×g for 10 minutes. The supernatant was removed, and the resulting pellet DNA was rinsed with 900 μL of 70% ethanol and then dissolved in 10 μL of TE.

[0338] All seed plasmids are cleaved by cleavage with SfiI into 7 fragments, but the smallest DNA fragments of 17 bp are washed away and disappear without precipitation when ethanol precipitation operation is performed after the restriction enzyme cleavage as described above. Instead of these fragments, the DNA barcode fragments described above were added to construct a library. 2 μg (0.1 μmol) of the purified DNA described above and the same number of moles of DNA barcode were added to adjust the total volume to 18 μL. To 9 μL of the mixture, 10 μL of 2× ligation buffer and 1 μL of T4DNA ligase were added, and after mixing, the mixture was reacted at room temperature for 1 hour. 100 μL of a Bacillus subtilis competent cell culture solution was added to 10 μL of a ligation product with two tubes, and the mixture was swirled and cultured for 30 minutes with a duck rotor. Thereafter, 300 μL of LB medium was added thereto, and the mixture was swirled and cultured at 37° C. for 1 hour. Thereafter, the whole culture solution was smeared on 10 plates containing tetracycline, and culture was performed overnight at 37° C. As a result, 88 colonies were obtained. These colonies were inoculated into 2 mL of LB medium containing tetracycline, and a culture solution was obtained by overnight culture to obtain plasmids. Each plasmid was fragmented using Illumina prep (Illumina, Inc.), base sequence analysis was performed using Miseq (Illumina, Inc.), and identification of original seeds plasmid and association of DNA barcodes were performed (Table 2). As a result, the ITR sequence was dominated by recombination units derived from specific seed plasmids, but for Rep and Cap recombination units, recombination units derived from various seed plasmids were included.

Production of rAAV from all-In-One Library

[0339] Plasmid DNAs (plasmids derived from Bacillus subtilis) were obtained by centrifuging 88 mL of the resulting culture solution obtained by collecting 1 mL of the culture solution from each of the culture solutions derived from the 88 colonies described above, and preparing a large amount of the Bacillus subtilis plasmid described above for the obtained bacterial pellets.

[0340] 2.5×10⁶ 293T cells were seeded in a 6 cm-dish the day before transfection. After 22 hours, the medium was replaced with 4.75 mL of DMEM medium (2% FBS, 1% penicillin/streptomycin), and culture was performed at 37° C. and 5% CO₂ for 2 hours. A transfection solution obtained by mixing 125 μL of DMEM medium containing 9.3 μg of the plasmids and 125 μL of DMEM medium containing PEI pro in an amount of 1-fold of DNA was added thereto.

[0341] After culturing at 37° C. and 5% CO₂ for 72 hours, 1/80 volume of 0.5M EDTA (pH 8.0) was added, and the mixture was allowed to stand at room temperature for 10 minutes. The detached cell suspension was recovered and centrifuged at 180×g for 5 minutes to completely remove the supernatant. The cell pellets were suspended in 400 μL of Lysis buffer (2 mM MgCl₂, 150 mM NaCl, 50 mM Tris, 0.1% Triton (registered trademark) X-100; pH 8.5), benzonase (75 units/mL) was further added thereto, and the mixture was reacted at 37° C. for 30 minutes. Thereafter, 2/100 volume of a 1.9 M MgSO₄ solution was added, and the mixture was allowed to stand at room temperature for 10 minutes. The supernatant was recovered by centrifugation at 12,000×g and 4° C. for 10 minutes, and Pluronic (registered trademark) F-68 was added at a final concentration of 0.001%.

Extraction of rAAV Genomes

[0342] 600 μL of water was added to 100 μL of the supernatant, 500 μL of TE saturated phenol was added thereto, and the mixture was well mixed. Then, the mixture was separated into two phases by centrifugation at 20,000×g for 5 minute, the aqueous phase was transferred to a new 1.5 mL tube, 600 μL of 1-butanol was added and mixed, centrifugation was performed at 20,000×g for about 10 seconds, the mixture was separated into two layers, and the upper butanol layer was discarded. 600 μL of 1-butanol was newly added and mixed, the mixture was centrifuged at 20,000×g for about 10 seconds and separated into two layers, and the upper butanol layer was discarded. This operation was continued until the aqueous layer became 450 μL or less. When the aqueous layer became 450 μL or less, 50 μL of P3 Buffer (Qiagen N.V.) was added, 900 μL of ethanol was further added and mixed, and then, centrifugation was performed at 20,000×g for 10 minutes. The supernatant was removed, and the resulting pellet DNA was rinsed with 900 μL of 70% ethanol and then dissolved in 10 μL of TE. Water was added to 1 μL of a 100-fold diluted solution of the DNA, 5 pmol of each of primers set forth in SEQ ID NO. 102 and SEQ ID NO. 103, 5 μL of 10×ExTaq Buffer (Takara Bio Inc.), 5 μL of 2.5 mM dNTP (Takara Bio Inc.), and 1 μL of Ex-Taq polymerase (Takara Bio Inc.) so that the total volume was 50 μL, and after 96° C. for 2 minutes, cycles of 98° C. for 20 seconds, 58° C. for 30 seconds, and 72° C. for 30 seconds were repeated 10 times to amplify the barcode region. For the obtained DNA, the molecular abundance ratio of each DNA barcode was examined by Miseq (Illumina, Inc.). In addition, for the ALL-in-One plasmids used for transfection, the molecular abundance ratio of each DNA barcode was determined in the same manner, and the transfection ratio for each clone was determined. The results are shown in Table 2. It was determined that the production amount per unit DNA of the viral vector was different depending on the difference in the sequence of All-in-One.

Production of rAAV by all-In-One Library Via Escherichia coli

[0343] The All-in-One plasmids prepared with the Bacillus subtilis were introduced into Escherichia coli, and in order to confirm whether the result of the obtained library plasmid was consistent with All-in-One derived from Bacillus subtilis, the following experiment was performed. 0.1 μL of the All-in-One plasmids prepared with the above Bacillus subtilis were introduced into electrocompetent cells (Takara Bio Inc.) of JM109 by electroporation (Bio-Rad Laboratories, Inc.), and selected on an LB plate containing 12.5 μg/mL of chloramphenicol to obtain tens of thousands of colonies. The pellets mixed with the colonies were recovered using a spreader, and plasmid DNAs (plasmids derived from Escherichia coli) were recovered by the above-described ultracentrifugation method for mass preparation.

[0344] 3×10⁶ 293T cells were seeded in a 10 cm-dish the day before transfection. After 22 hours, the medium was replaced with 9.5 mL of DMEM medium (2% FBS, 1% penicillin/streptomycin), and culture was performed at 37° C. and 5% CO₂ for 2 hours. A transfection solution obtained by mixing 250 μL of DMEM medium containing 12.5 μg of the plasmids and 250 μL of DMEM medium containing PEI pro in an amount of 1-fold of DNA was added thereto.

[0345] After culturing at 37° C. and 5% CO₂ for 72 hours, 1/80 volume of 0.5M EDTA (pH 8.0) was added, and the mixture was allowed to stand at room temperature for 10 minutes. The detached cell suspension was recovered and centrifuged at 180×g for 5 minutes to completely remove the supernatant. The cell pellets were suspended in 400 μL of Lysis buffer (2 mM MgCl₂, 150 mM NaCl, 50 mM Tris, 0.1% Triton (registered trademark) X-100; pH 8.5), benzonase (75 units/mL) was further added thereto, and the mixture was reacted at 37° C. for 30 minutes. Thereafter, 2/100 volume of a 1.9 M MgSO₄ solution was added, and the mixture was allowed to stand at room temperature for 10 minutes. The supernatant was recovered by centrifugation at 12,000×g and 4° C. for 10 minutes, and Pluronic (registered trademark) F-68 was added at a final concentration of 0.001%.

[0346] The viral genome DNA was extracted in the same manner as in the case of the plasmids derived from Bacillus subtilis, and the abundance ratio was examined by MiSeq. The results are shown in Table 2. The obtained results were almost similar to those of the plasmids derived from Bacillus subtilis.

TABLE 2

| | | | | | Out/In(relative value) | |
|---|---|---|---|---|---|---|
| Clone | Original seed plasmid No. | | | | Bacillus subtilis | Escherichia coli |
| No. | SITR | 31TR | Helper | Rep | -derived | -derived |
| 1 | #1 | #5 | #5 | #3 | | |
| 2 | #1 | #5 | #5 | #3 | 1.3 | 2.6 |
| 3 | #1 | #5 | #3 | #5 | 1 | 3.3 |
| 4 | | | | | | |
| 5 | #1 | #5 | | | 1 | 1 |
| 6 | #1 | #5 | #3 | #3 | 6 | 4.8 |
| 7 | #1 | #5 | #5 | #5 | 4 | 8 |
| 8 | #1 | #1 | #5 | #3 | 1.6 | 0.6 |
| 9 | #1 | #5 | #5 | #5 | 1.4 | 0.2 |
| 10 | | | | #5 | | |
| 11 | #1 | #5 | #3 | #5 | 1.7 | 1 |
| 12 | #1 | #5 | #5 | #5 | 1 | 0.2 |
| 13 | #1 | #5 | #4 | #4 | 1.9 | 0.8 |
| 14 | | | | | | |
| 15 | | #5 | #5 | | | |
| 16 | #1 | #5 | #5 | #3 | 1 | 3.8 |
| 17 | #3 | | #5 | #1 | 18 | 24.8 |
| 18 | #1 | #5 | #1 | | 5.3 | 20.5 |
| 19 | #1 | #5 | #5 | #5 | 1 | 1 |
| 20 | | | | #5 | | |
| 21 | | | | | | |
| 22 | #1 | #5 | #3 | #1 | 0.4 | 0.2 |
| 23 | | | #5 | #3 | | |
| 24 | #1 | #5 | #1 | #4 | | |
| 25 | | | | #5 | | |
| 26 | #1 | #1 | #3 | #5 | | |
| 27 | | | | #5 | | |
| 28 | #1 | #1 | #5 | #5 | 0.1 | 0 |
| 29 | | | | #4 | | |
| 30 | #1 | #5 | #5 | #3 | | |
| 31 | #1 | #5 | #5 | #5 | 1.5 | 2.9 |
| 32 | #1 | #5 | #5 | #5 | 1.6 | 0.3 |
| 33 | #1 | #5 | #5 | #5 | | |
| 34 | | | | | 1 | 0 |
| 35 | #1 | #5 | #5 | #5 | 2.3 | 6 |
| 36 | | | | #3 | | |
| 37 | | | | #5 | | |
| 38 | #1 | #5 | #5 | | 1 | 0.2 |
| 39 | #1 | #5 | #5 | #5 | 1.7 | 11.3 |
| 40 | #1 | #1 | #5 | #1 | | |
| 41 | #1 | #5 | #3 | #4 | 0.9 | 1 |
| 42 | #1 | #5 | #3 | #5 | | |

| | | | | | | |
|---|---|---|---|---|---|---|
| 43 | #5 | #3 | #5 | | | |
| 44 | #1 | #5 | #5 | #5 | 1 | 1 |
| 45 | #1 | #5 | #5 | #4 | 2.8 | 3.8 |
| 46 | | | | #4 | | |
| 47 | #1 | #5 | #5 | #5 | 1.5 | 2 |
| 48 | #1 | #5 | #5 | #4 | 3.1 | 1.3 |
| 49 | | | | #5 | | |
| 50 | #1 | #1 | #4 | #3 | 2.9 | 11 |
| 51 | #3 | #5 | #5 | #3 | | |
| 52 | | | | #1 | | |
| 53 | #4 | #5 | #5 | #5 | | |
| 54 | #1 | #5 | #5 | #3 | | |
| 55 | | | | #3 | | |
| 56 | | | | | | |
| 57 | | | | | | |
| 58 | #1 | #1 | #5 | #1 | 2.1 | 1.9 |
| 59 | #1 | #5 | #5 | #1 | 1.7 | 3.4 |
| 60 | #1 | #5 | #5 | #5 | | |
| 61 | | | | | | |
| 62 | | | | #5 | | |
| 63 | #1 | #5 | #3 | #5 | 1 | 0.8 |
| 64 | | | | #4 | | |
| 65 | | | | #5 | | |
| 66 | #1 | | | #4 | | |
| 67 | #1 | #5 | #1 | #5 | 2.2 | 2.3 |
| 68 | #1 | #5 | #5 | #4 | 2.5 | 4 |
| 69 | #1 | #1 | #5 | #3 | 1 | 0.1 |
| 70 | #1 | #5 | #5 | #5 | 2.1 | 0.9 |
| 71 | #1 | #5 | #5 | #5 | 2.1 | 0 |
| 72 | #5 | #5 | #5 | #5 | 6.8 | 0 |
| 73 | #1 | #5 | #5 | #1 | 1 | 10.3 |
| 74 | | | | #3 | | |
| 75 | | | | #3 | | |

* The absence of the number of the original seed plasmid indicates that the corresponding seed plasmid cannot be detected.
* Out/In indicates a ratio of the number of genomic copies of the resulting viral vector and the number of copies of the plasmids used at the time of transfection in one transfection experiment, which is calculated based on the read number of the DNA barcode region by the next generation sequencer.

### Example 2: Screening of all-In-One by Individual Transfection

### Design of CombiOGAB Library

[0347] In order to expand the five types of libraries of Example 1, a total of eight types of seed plasmids were designed by adding new seed plasmids as shown in Table 3 and FIG. 3 for each of 5′ ITR, 3′ ITR, Helper, and Rep recombination units.

TABLE 3

| Seed plasmid | 5′ITR | 3′ITR | Helper | Rep |
|---|---|---|---|---|
| No. | recombination unit | recombination unit | recombination unit | recombination unit |
| #1 | Improved | AAV-5 | Ad-2 | Improved |
| | AAV-2 | | | AAV-2 |
| #2 | AAV-1 | AAV-1 | Ad-12 | AAV-1 |
| #3 | AAV-2 | AAV-2 | Ad-14 | AAV-2 |
| #4 | AAV-3 | AAV-3 | Ad-5 | AAV-3 |
| #5 | AAV-4 | AAV-4 | Ad-8 | AAV-8 |
| #6 | AAV-5 | Improved | Ad-4 | AAV-5 |
| | | AAV-2 | | |
| #7 | AAV-6 | AAV-6 | Ad-40 | AAV-10 |
| #8 | AAV-7 | AAV-7 | Ad-52 | AAV-7 |

[0348] Among them, as for #1, the 3′ ITR of #1 in Example 1 was changed from AAV-2 to AAV-5. In this case, the DNA fragment obtained by newly synthesizing the third fragment of #1 of Example 1 is set forth in SEQ ID NO: 104. In addition, the 18 and 19 fragments prepared for the synthesis of #6 to #8 are set forth in SEQ ID NOs: 105 to 159. The restriction enzymes used to cut out the DNA fragments for the OGAB method are shown in Table A.

TABLE A

| Seed plasmid | | | | | | | | |
|---|---|---|---|---|---|---|---|---|
| No. | #1 | #2 | #3 | #4 | #5 | #6 | #7 | #8 |
| First fragment | AarI | AarI | AarI | AarI | AarI | AarI | AarI | AarI |
| Second fragment | AarI | AarI | AarI | AarI | AarI | AarI | AarI | AarI |
| Third fragment | AarI | AarI | AarI | AarI | AarI | AarI | AarI | AarI |
| Fourth fragment | BsmBI | AarI | BsaI | BsmBI | BsmBI | BsmBI | BsaI | BsaI |
| Fifth fragment | AarI | BsmBI | AarI | AarI | AarI | BsaI | AarI | AarI |
| Sixth fragment | AarI | BsmBI | BsaI | AarI | BsmBI | BsaI | BsaI | BsaI |
| Seventh fragment | AarI | AarI | BsaI | BsmBI | AarI | AarI | AarI | AarI |
| Eighth fragment | BsmBI | AarI | BsaI | BsmBI | BsmBI | BsmBI | BsaI | BsaI |
| Ninth fragment | BsmBI | BsmBI | AarI | AarI | AarI | BsaI | AarI | AarI |
| Tenth fragment | AarI | BsmBI | BsaI | AarI | BsmBI | AarI | BsaI | BsaI |
| Eleventh fragment | AarI | BsmBI | AarI | BsmBI | BsmBI | BsmBI | AarI | AarI |
| Twelfth fragment | AarI | BsmBI | AarI | AarI | BsmBI | AarI | BsaI | BsaI |
| Thirteenth fragment | BsmBI | BsmBI | AarI | BsmBI | BsmBI | BsmBI | BsaI | BsaI |
| Fourteenth fragment | BsmBI | AarI | AarI | BsmBI | BsmBI | AarI | AarI | AarI |
| Fifteenth fragment | BsmBI | AarI | BsaI | BsmBI | AarI | BsaI | AarI | AarI |
| Sixteenth fragment | BsmBI | AarI | BsaI | AarI | AarI | BsaI | AarI | AarI |
| Seventeenth fragment | AarI | AarI | AarI | AarI | AarI | AarI | AarI | AarI |
| Eighteenth fragment | AarI | AarI | AarI | AarI | AarI | AarI | AarI | AarI |
| Nineteenth fragment | AarI | | AarI | AarI | | AarI | | |

[0349] Plasmids were once produced by the OGAB method in the same manner as that of Example 1, and then, in order to eliminate the SfiI (GTT) recognition site present in the plasmids, each plasmid was digested with NotI. Thereafter, a short NotI fragment of about 100 bp desired to be eliminated was removed by electrophoresis, and the remaining 2 fragments were cyclized. By introducing the fragments into Escherichia coli JM109, a seed plasmid having one SfiI fragment less than that in Example 1 was constructed. The base sequences of the plasmids #1 to #8 are set forth in SEQ ID NOs: 160 to 167.

### Construction of CombiOGAB Library

[0350] Escherichia coli with various plasmids was cultured overnight in LB medium containing 200 mL of chloramphenicol (Nacalai Tesque INC.) at a concentration of 12.5 μg/mL, and a seed plasmid mass preparation method was performed by ultracentrifugation. 1 μg of each of eight types of seed plasmids prepared by mass preparation was cleaved by SfiI in the same manner as that of Example 1, and the fragments were purified. Other than that, ligation and transformation were performed in the same manner as that of Example 1. As a result, 233 transformants were obtained. All colonies were cultured in 2 mL of LB medium containing 10 μg/mL of tetracycline and 1 mM IPTG, and then centrifuged at 6,800×g for 3 minutes to recover cell pellets. The cell pellets were reacted with 200 μL of P1 Buffer containing lysozyme at room temperature for 5 minutes, and then, the pellets were recovered again under the same centrifugation conditions. Then, the cell pellets were purified by QIAquick Miniprep kit (Qiagen N.V.) using a QIAcube (Qiagen N.V.) automation device. The resulting plasmids were fragmented with Illumina prep (Illumina, Inc.) and analyzed with Miseq (Illumina, Inc.) to identify a seed plasmid from which each plasmid was derived. The results of 48 of these clones are shown in Table 4. As in Example 1, the construction of the plasmid library containing various combinations of Helper recombination unit and Rep recombination unit was confirmed.

Production of rAAV

[0351] 5×10⁴ 293T cells were seeded in a 96-well plate the day before transfection. After 22 hours, the medium was replaced with 90 μL of DMEM medium (2% FBS, 1% penicillin/streptomycin), and culture was performed at 37° C. and 5% CO₂ for 2 hours. Each transfection solution obtained by mixing a solution containing 185 ng of each plasmid and DMEM medium containing PEI pro in an amount of 1-fold of DNA was added thereto.

[0352] After culturing at 37° C. and 5% CO₂ for 72 hours, a solution obtained by adding Benzonase (200 units/mL) to 10× Lysis buffer (20 mM MgCl₂, 1.5M NaCl, 500 mM Tris, 1% Triton (registered trademark) X-100; pH 7.5) was added at 10 v/v %, and the mixture was reacted at 37° C. for 60 minutes. Thereafter, 2/100 volume of a 1.9 M MgSO₄ solution was added, and the mixture was allowed to stand at room temperature for 10 minutes. The supernatant was recovered by centrifugation at 3,750 rpm and room temperature for 10 minutes.

[0353] In order to quantify the number of genomic copies of rAAV, DNaseI treatment was performed for 30 minutes, and a sample reacted at 95° C. for 10 minutes was diluted 1,000 times and subjected to qPCR. The target was ITR2, and the primer sequences used were SEQ ID NO: 168 and SEQ ID NO: 169. As the reaction conditions, after 10 minutes at 95° C., 40 cycles of 95° C./15 seconds, 55° C./5 seconds, and 72° C./30 seconds were repeated. The results are shown in Table 4. In the individual screening system, All-in-One plasmids having different viral production amounts were screened.

TABLE 4

| Original seed plasmid No. | | | | | Amount of viral vector |
|---|---|---|---|---|---|
| Clone No. | 5′ITR | 3′ITR | Helper | Rep | (VG/ml) |
| 1 | #1 | #6 | #5 | #1 | 2.49E+08 |
| 2 | | | #2 | #8 | 1.70E+08 |
| 3 | #1 | #6 | #6 | #1 | 2.51E+09 |
| 4 | #1 | #6 | #6 | #7 | 1.68E+09 |
| 5 | #1 | #6 | #3 | #6 | 1.69E+09 |
| 6 | #1 | #6 | #7 | #1 | 1.07E+08 |
| 7 | | | #1 | #4 | 6.71E+08 |
| 8 | #1 | #6 | #1 | #6 | 1.41E+09 |
| 9 | #1 | #6 | #6 | #1 | 3.78E+08 |
| 10 | #1 | #6 | #7 | #6 | 1.59E+08 |
| 11 | #1 | #6 | #6 | #1 | 8.94E+07 |
| 12 | #1 | #6 | #1 | #1 | 3.14E+08 |
| 13 | #1 | #6 | #5 | #5 | 8.35E+08 |
| 14 | #1 | #6 | #6 | #8 | 1.20E+09 |
| 15 | #1 | #6 | #1 | #1 | 8.34E+08 |
| 16 | #1 | #6 | | #1 | 2.23E+09 |
| 17 | #1 | #6 | #4 | #4 | 1.93E+09 |
| 18 | #1 | #6 | #1 | #6 | 2.11E+09 |
| 19 | #1 | #6 | #5 | #5 | 1.03E+09 |
| 20 | #1 | #6 | #6 | #2 | 1.60E+10 |
| 21 | #1 | #6 | #5 | #7 | 5.58E+08 |
| 22 | #1 | #6 | #2 | #6 | 1.45E+09 |
| 23 | #1 | #6 | #7 | #4 | 2.02E+09 |
| 24 | #1 | #6 | #2 | #1 | 5.42E+09 |
| 25 | #1 | #6 | #7 | #4 | 1.23E+08 |
| 26 | #1 | #6 | #6 | #2 | 1.37E+09 |
| 27 | #1 | #6 | #5 | #6 | 1.42E+09 |
| 28 | #1 | #6 | #4 | #6 | 1.50E+09 |
| 29 | #1 | #6 | #8 | #2 | 2.17E+09 |
| 30 | #1 | #6 | #1 | #5 | 1.81E+09 |
| 31 | #1 | #6 | #2 | #6 | 6.59E+08 |
| 32 | #1 | #6 | #6 | #1 | 1.59E+09 |
| 33 | #1 | #6 | #2 | #6 | 2.18E+09 |
| 34 | #1 | #6 | #7 | #2 | 1.06E+09 |
| 35 | #1 | #6 | #7 | #6 | 5.96E+08 |
| 36 | #1 | #6 | #8 | #6 | 2.37E+08 |
| 37 | #1 | #6 | #8 | #1 | 1.23E+09 |
| 38 | #3 | #6 | #6 | #6 | 2.64E+09 |
| 39 | #1 | #5 | #6 | #1 | 1.84E+09 |
| 40 | #3 | #6 | #8 | #2 | 3.34E+09 |
| 41 | #1 | #6 | #6 | #1 | 3.94E+09 |
| 42 | | #6 | #5 | #6 | 2.04E+09 |
| 43 | | | | #2 | 1.28E+09 |
| 44 | #1 | #6 | #2 | #6 | 2.24E+09 |
| 45 | #1 | #5 | #6 | #7 | 1.68E+09 |
| 46 | #1 | #6 | #1 | #5 | 8.52E+09 |
| 47 | #1 | #6 | #7 | #2 | 9.82E+08 |
| 48 | #1 | #6 | #6 | #2 | 2.71E+09 |

Evaluation of rAAV

[0354] 1×10⁶ 293T cells were seeded in a 6-well plate the day before transfection. After 22 hours, the medium was replaced with 2.85 mL of DMEM medium (2% FBS, 1% penicillin/streptomycin), and culture was performed at 37° C. and 5% CO₂ for 2 hours. Each T transfection solution obtained by mixing a solution containing 4 μL of each plasmid (Control, #20, #24, or #46) and DMEM medium containing PEI pro in an amount of 1-fold of DNA was added thereto.

[0355] After culturing at 37° C. and 5% CO₂ for 72 hours, 1/80 volume of 0.5M EDTA (pH 8.0) was added, and the mixture was allowed to stand at room temperature for 10 minutes. The detached cell suspension was recovered and centrifuged at 180×g for 5 minutes to completely remove the supernatant. The cell pellets were suspended in 300 μL of Lysis buffer (2 mM MgCl₂, 150 mM NaCl, 50 mM Tris, 0.1% Triton (registered trademark) X-100; pH 8.5), benzonase (83 units/mL) was further added thereto, and the mixture was reacted at 37° C. for 30 minutes. Thereafter, 2/100 volume of a 1.9 M MgSO₄ solution was added, and the mixture was allowed to stand at room temperature for 10 minutes. The supernatant was recovered by centrifugation at 12,000×g and 4° C. for 10 minutes, and Pluronic (registered trademark) F-68 was added at a final concentration of 0.001%.

[0356] In order to quantify the number of genomic copies of rAAV, DNaseI treatment was performed for 30 minutes, and a sample reacted at 95° C. for 10 minutes was diluted 1,000 times and subjected to qPCR. The target was the 3′ ITR of AAV-2, and the primer sequences used were SEQ ID NO: 168 and SEQ ID NO: 169. As the reaction conditions, after 10 minutes at 95° C., 40 cycles of 95° C./15 seconds, 55° C./5 seconds, and 72° C./30 seconds were repeated. The results are illustrated in FIG. 4. The AAV2 production amount of each of Control (pGETS103-AAV-Helper-RC2, SEQ ID NO: 170), #20, #24, and #46 was 1.55×10¹⁰ GC/mL, 1.62×10⁹ GC/mL, 4.07×10⁹ GC/mL, and 2.44×10¹⁰ GC/mL, and the production amount of #46 was high.

[0357] Purification of rAAV was performed to evaluate the Empty/Full rate of #46. First, three types of cesium chloride solutions (1.35 g/cm³, 1.27 g/cm³, and 1.25 g/cm³) were overlaid in 0.5 mL, 2.5 mL, and 1.0 mL, respectively, and the cell extract of rAAV was overlaid thereon. Density gradient centrifugation at 226,000×g and 18° C. for 1.5 hours was performed to recover about 2 mL of the solution around 1.27 g/cm³, and Pluronic (registered trademark) F-68 was added at a final concentration of 0.001%. Next, in order to exchange the solvent, the solution was replaced with TBS (0.005% Pluronic (registered trademark) F-68, 10% Sucrose, 100 mM Tris, 200 mM NaCl, pH 7.4) using a 30 K ultrafiltration filter (Merck; Amicon Ultra-0.5). In order to evaluate the Full rate of the rAAV sample, measurement was performed by a mass spectrometry method using Refeyn One (Life Sciences Solutions). The results are illustrated in FIG. 5. The Full rate was 61.3%.

### Example 3: Assumed Seed Plasmid Structure

[0358] FIGS. 6 to 10 illustrate examples of the assumed seed plasmid structure. Each functional unit illustrated in the schematic diagram may be separately included in one alternative unit nucleic acid, or a plurality of adjacent functional units may be included in one alternative unit nucleic acid. These seed plasmids are used to perform the method for producing virus-derived construct plasmids of the present disclosure to obtain plasmids having an excellent desired function (for example, the production amount of a virus-derived constituent).
[0359] Promoters (weak, medium, and strong) are indicated by shading.
[0360] Promoters (arrows) indicate positive and negative directions.
   (FIG. 6: Examples for AAV Vector Plasmid of the all-In-One Structure)
[0361] FIG. 6A: Example of order of ITR→Rep→Cap→Helper
[0362] FIG. 6B: Example of order of Rep→ITR→Cap→Helper (structure in which positions of Rep and Cap are exchanged is also intended).
[0363] FIG. 6C: Example in which Helper genes are divided and arranged

### (FIG. 7: Examination Example of Variation of Rep/Cap)

[0364] FIG. 7A: Examination example of arrangement obtained by dividing Rep gene and variation in expression intensity of promoter
[0365] FIG. 7B: Examination example of arrangement obtained by dividing Cep gene and variation in expression intensity of promoter
[0366] Promoters (weak, medium, and strong) are indicated by shading.

### (FIG. 8: Examination Example of Variation of Helper)

[0367] FIG. 8A: Examination example of arrangement obtained by dividing Helper gene and variation in expression intensity of promoter
[0368] FIG. 8B: Examination example of combination of AdV-derived Helper gene and Helper gene derived from another virus and variation in positive and negative directions of promoter
[0369] FIG. 8C: Examination example of combination of AdV-derived Helper gene and nucleic acid sequence involved in biosynthesis and variation in positive and negative directions of promoter

### (FIG. 9: Example for Lentiviral Vector Plasmid)

[0370] FIG. 9A: Examination example of variation in expression intensity of promoter of LV vector plasmid having All-in-One structure
[0371] FIG. 9B: Examination example of variation in expression intensity of plurality of desired genes

### (FIG. 10: Example for Adenoviral Vector Plasmid).

[0372] FIG. 10A: Examination example of variation in structural protein of AdV vector plasmid having All-in-One structure
[0373] FIG. 10B: Examination example of variation in expression intensity of plurality of desired genes

### Example 4: Combinatorial Promoter Library of Helper Gene Expression Plasmids

### Design of Seed Plasmids for CombiOGAB Method

[0374] Five types of pHelper seed plasmids (SEQ ID NOs: 237 to 241) loading E1A and EB regions in addition to the VA, E4 and E2A regions usually used for helper plasmids were designed as shown in Table 5. When these plasmids are used, AAV production in producer cells other than HEK293 and HEK293T cells is possible. In addition to the wild-type promoter of each of E2A, E4orf6, E1A and E1B, any of the sequences of three types of promoters (UBC promoter, mPGK promoter, and EF1A promoter) having different expression intensities was linked to each gene region (see also FIG. 11).

TABLE 5

| | | 2nd | 3rd | 4th | 5th |
|---|---|---|---|---|---|
| | | E2A-SV40 | E4orf6-bGH | E1A-hGH | E1B-HSV |
| Seed plasmid | 1st | polyA | polyA | polyA | polyA |
| No. | VA | signal | signal | signal | signal |
| #9 | WT_endogenous | WT_E2A | WT_E4 | WT_E1A | WT_E1B |
| | promoter | promoter | promoter | promoter | promoter |
| #10 | WT_endogenous | WT_E2A | EF1A | mPGK | UBC |
| | promoter | promoter | promoter | promoter | promoter |
| #11 | WT_endogenous | UBC | WT_E4 | EF1A | mPGK |
| | promoter | promoter | promoter | promoter | promoter |
| #12 | WT_endogenous | mPGK | UBC | WT_E1A | EF1A |
| | promoter | promoter | promoter | promoter | promoter |
| #13 | WT_endogenous | EF1A | mPGK | UBC | WT_E1B |
| | promoter | promoter | promoter | promoter | promoter |

[0375] Here, VA, each gene, and the poly A signal sequence downstream thereof are commonly designed between seed plasmids, and the target of the combinatorial library by the CombiOGAB method is a promoter portion. A restriction enzyme SfiI recognition site (5′-GGCCnNNN/nGGCC-3′; n and N are any of A, T, G, and C; capital letters N are 3′ end protruding portions) was located at the boundary of each region. Each 3′ end protruding of the three bases generated when each SfiI recognition site was cleaved was designed to be the only sequence in the plasmid. In the combinatorial library production by the CombiOGAB method, the order and direction of the adjacent DNA fragments are specified by the complementarity of the protruding portions. Thus, the seed plasmids were designed so that, for all types of seed plasmids, the corresponding unit DNAs at the positions of the respective genes had the same protruding sequence as illustrated in FIG. 11. Although some genes to be used naturally contain SfiI recognition sequences, such SfiI recognition sequences were deleted by replacing them with synonymous codons in the case of protein coding sequences and changing the sequences in the case of non-coding regions such as within ITR sequences.

### Preparation of Integrated Nucleic Acids for OGAB Method

[0376] Five cloning plasmids pBR-delTypeIIS-1st, pBR-delTypeIIS-2nd, pBR-delTypeIIS-3rd, pBR-delTypeIIS-4th, and pBR-delTypeIIS-5th, which are plasmid vectors constructed so that unit DNAs containing a promoter-ORF-poly A signal can be cut out by SfiI, were constructed by cleaving pBR-delTypeIIS-3-AarI (SEQ ID NO: 99) with AarI, and then linking linker DNAs constructed by annealing synthetic DNAs of SEQ ID NOS: 171 and 172, SEQ ID NOs: 173 and 174, SEQ ID NOs: 175 and 176, SEQ ID NOs: 177 and 178, and SEQ ID NOs: 179 and 180, respectively.

[0377] Other necessary DNAs were obtained from appropriate template DNAs by a PCR method. The reaction was performed by adding 13.3 μL of water, 2 μL of 10×Ex-Taq buffer (Takara Bio Inc.), 1.6 μL of 2.5 mM dNTP (Takara Bio Inc.), 0.1 μL of Ex-Taq, and 1 μL of each of the following primers at 3.2 pmol/μL were added to 1 μL of a template DNA solution (about 0.01 ng/μl), and subjecting the mixture to 30 cycles of reactions at 98° C. for 2 minutes, at 98° C. for 20 seconds, at 58° C. for 30 seconds, and at 72° C. for 1 minute per 1 kb. Thereafter, purification was performed using MinElute PCR Purification Kit (Qiagen N.V.), 0.5 μL of 6 ng/μL of pTAKN-2 (BioDynamics Laboratory Inc.) and 2.5 μL of DNA Ligation Kit <Mighty Mix> were added thereto, a ligation reaction was performed at 16° C. for 3 hours, and transformation was performed using Escherichia coli JM109 competent cells (Takara Bio Inc.). After overnight culture, the base sequences of the colonies that appeared on an LB plate containing 25 μg/ml of kanamycin were confirmed, and a clone having a correct sequence for each fragment was obtained. For confirmation and amplification of promoter fragments for WT_E2A, WT_E4, WT_E1A, WT_E1B, UBC, mPGK, and EF1A, respectively, the sets of primers set forth in SEQ ID NOs: 181 and 182, SEQ ID NOs: 183 and 184, SEQ ID NOs: 185 and 186, SEQ ID NOs: 187 and 188, SEQ ID NOs: 189 and 190, SEQ ID NOs: 191 and 192, and SEQ ID NOs: 193 and 194, respectively, were used. For confirmation and amplification of the genes (VA) and ORFs of VA (including WT_endogenous promoter), WT_E2A, WT_E4, WT_E1A, and WT_E1B, the sets of primers set forth in SEQ ID NOs: 195 and 196, SEQ ID NOs: 197 and 198, SEQ ID NOs: 199 and 200, SEQ ID NOs: 201 and 202, and SEQ ID NOs: 203 and 204, respectively, were used. For confirmation and amplification of SV40 poly A signal, bGH poly A signal, hGH poly A signal, and HSV poly A signal, the sets of primers set forth in SEQ ID NOs: 205 and 206, SEQ ID NOs: 207 and 208, SEQ ID NOS: 209 and 210, and SEQ ID NOs: 211 and 212, respectively, were used. Note that, a recognition site of BspQI, which is TypeIIS restriction enzyme capable of generating an arbitrary 3-base sequence, was introduced into the 5′ ends of these primers, and the resulting DNA fragments were cleaved with BspQI to design protruding sequences so that the promoter-ORF-poly A signal can be accumulated in five cloning plasmid vectors from pBR-delTypeIIS-1st to -5th in this order. These amplified DNAs were ligated to pTAKN-2 to construct 16 types of plasmids having respective fragments. These plasmids and 5 cloning plasmid vectors from pBR-delTypeIIS-1st to -5th were combined and mixed according to Table 1, and 17 types of OGAB block plasmids required to construct seed plasmids were constructed by the Golden Gate method. Specifically, 12 μL of water, 2 μL of 10×3.1 NEB buffer (NEB), 0.5 μL of BspQI (NEB), and 1.5 μL of T4-Ligase were added to 1 μL of each DNA solution (100 ng/μl), the mixture was subjected to 30 cycles of reactions at 37° C. for 1 minute and at 16° C. for 1 minute, and thereafter, the mixture was left at 16° C. for 3 hours or longer. JM109 competent cells (Takara Bio Inc.) were transformed using the obtained resultant, smeared on an LB plate containing 100 μg/ml of carbenicillin, and cultured overnight at 37° C. to obtain transformants.

### Preparation of Equimolar Mixture of DNA Fragments for OGAB Method

[0378] Escherichia coli with the OGAB block plasmids was cultured in 2 mL of LB medium, and plasmids were purified with automated system QIAcube by QIAcube by QIAprep Spin Miniprep Kit (Qiagen N.V.) and finally eluted into 30 μL of TE buffer. The resulting plasmids were cleaved with restriction enzymes SfiI (NEB) and ApaLI (NEB), and 17 types of fragments of about 0.8 kb to 3.2 kb were recovered by electrophoresis with a low-melting point agarose gel. After the DNA concentration was measured by a fluorometer (Qubit, Thermo Fisher Scientific Inc.), the volume required for accurately fractionating equimolar DNA was calculated to two decimal places in μL, and each fragment was fractionated with a micropipette to prepare a solution in which 5 types of DNA fragments required for each seed plasmid were mixed in equimolar amounts.

### Preparation of Fragments for OGAB Integration

[0379] Plasmid pGETS161 was cleaved with restriction enzyme SfiI and size-fractionated by low melting point agarose gel electrophoresis, and large fragments of 5.8 kb were cut out from gel and purified to obtain fragments for OGAB integration.

### Plasmid Formation by OGAB Method

[0380] TE buffer was added to a mixed solution (6.8 fmol) of the resulting 5 DNA fragments and the fragments for OGAB integration (6.8 fmol) so that the total amount was 8 μL, and 10 μL of 2× ligation buffer (15% polyethylene glycol 6000, 500 mM NaCl, 132 mM Tris. HCl (pH 7.6), 13.2 mM MgCl₂, 20 mM DTT, 0.2 mM ATP) was added thereto. Then, the mixture was well mixed, 2 μL of T4 DNA Ligase (Takara Bio Inc.) was added, and the mixture was incubated at 37° C. for 0.5 hours, thereby preparing transforming DNA linked in tandem repeats. 100 μL of competent cells of Bacillus subtilis were added thereto, and the mixture was subjected to rotary culture at 37° C. for 30 minutes using a duck rotor. Thereafter, 300 μL of LB medium was added, and rotary culture was performed at 37° C. for 1 hour with a duck rotor. Thereafter, the culture solution was spread on an LB plate containing 10 μg/mL of tetracycline (Sigma-Aldrich), and culture was performed overnight at 37° C. to obtain candidate transformants of the seed plasmids.

### Confirmation of Plasmid Structure of Transformant

[0381] Six colonies were randomly selected from the resulting candidate transformants, cultured in 2 mL of LB medium containing 10 μg/mL of tetracycline for 5 hours, and a small amount of plasmids was extracted from the resulting bacterial cells by the following procedure. 2 mL of the bacterial solution was placed in a 1.5 mL centrifuge tube and centrifuged at 6,800×g for 3 minutes, and the supernatant was removed with a micropipette. The resulting cell pellets were well suspended, 100 μL of P1 buffer containing 10 mg/mL of egg white lysozyme (Wako Pure Chemical Industries, Ltd.) was added, and then the cell pellets were incubated at 37° C. for 5 minutes. Then, 200 μL of P2 buffer was added and mixed by inversion 4 times. Thereafter, 150 μL of P3 was added, and mixing was performed by inversion 4 times. The resultant was centrifuged at 20,000×g for 5 minutes to separate into a white precipitate and a supernatant. The supernatant was transferred to a new 1.5 mL centrifuge tube, into which 450 μL of TE saturated phenol (Nacalai Tesque INC.) was added, and mixed well. Then, the mixture was centrifuged at 20,000×g for 10 minutes to separate into a phenol phase and an aqueous phase, 320 μL of the aqueous phase was transferred to a new tube, into which 900 μL of ethanol was added, and the mixture was centrifuged at 20,000×g for 5 minutes. The supernatant was removed with a micropipette, 900 μL of 70% ethanol was added, and the entire tube was rinsed. Thereafter, 70% ethanol was removed with a micropipette, and the resulting precipitate was dissolved in 25 μL of TE buffer. 8 μL of the resulting plasmid solution was taken, 1 μL of 10× CutSmart buffer (NEB) and 1 μL of a restriction enzyme appropriate for confirming the structure of each seed plasmid were added thereto, the mixture was reacted at 37° C. for 1 hour, and the cleavage pattern was confirmed by agarose gel electrophoresis, thereby obtaining one clone matching the assumed restriction enzyme cleavage pattern for each seed plasmid.

### Seed Plasmid Mass Preparation Method

[0382] High purity plasmid DNAs were prepared by cesium chloride-ethidium bromide density gradient ultracentrifugation. 200 mL of a mixture obtained by adding tetracycline to LB medium so as to be 10 μg/mL was prepared, 100 mL of the mixture was added to a 500 mL Erlenmeyer flask to inoculate Bacillus subtilis plasmid-retaining strain, culture was performed at 37° C. for 16 hours, and then plasmids were purified by ultracentrifugation. These plasmids were fragmented with Illumina prep (Illumina, Inc.) and the MiSeq (Illumina, Inc.) entire base sequence was determined to obtain clones in which each seed plasmid was correctly integrated.

### CombiOGAB Library

[0383] To 2 μg of four types of seed plasmids obtained by mass preparation, water was added so as to be 85 μL, 10 μL of 10× CutSmart buffer (NEB) and 5 μL of restriction enzyme SfiI were added, and then, the mixture was reacted at 50° C. for 1 hour. After completion of the reaction, 50 μL of water and 150 μL of TE saturated phenol (Nacalai Tesque INC.) were added, and then the mixture was mixed. Then, the mixture was separated into two phases by centrifugation at 20,000×g for 5 minute, the aqueous phase was transferred to a new 1.5 mL tube, 500 μL of 1-butanol was added and mixed, centrifugation was performed at 20,000×g for about 10 seconds, the mixture was separated into two layers, and the upper butanol layer was discarded. 500 μL of 1-butanol was newly added and mixed, the mixture was centrifuged at 20,000×g for about 10 seconds and separated into two layers, and the upper butanol layer was discarded. This operation was continued until the aqueous layer became 450 μL or less. When the aqueous layer became 450 μL or less, 50 μL of P3 Buffer (Qiagen N.V.) was added, 900 μL of ethanol was further added and mixed, and then, centrifugation was performed at 20,000×g for 10 minutes. The supernatant was removed, and the resulting pellet DNA was rinsed with 900 μL of 70% ethanol and then dissolved in 20 μL of TE.

[0384] About 1 μg of the purified DNA described above was adjusted to 12 μL. 15 μL of 2× ligation buffer and 3 μL of T4DNA ligase were added thereto, and after mixing, the mixture was reacted at room temperature for 4 hours. 100 μL of a Bacillus subtilis competent cell culture solution was added to 10 μL of a ligation product with three tubes, and the mixture was swirled and cultured for 30 minutes with a duck rotor. Thereafter, 300 μL of LB medium was added thereto, and the mixture was swirled and cultured at 37° C. for 1 hour. Thereafter, the whole culture solution was smeared on 12 plates containing tetracycline, and culture was performed overnight at 37° C. As a result, about 30,000 colonies were obtained.

Production of rAAV from pHelper Promoter Library

[0385] 96 of these colonies were randomly selected, inoculated into 2 mL of LB medium containing tetracycline, and cultured overnight. A small amount of plasmids was extracted from the resulting culture solution by the following procedure. 2 mL of the bacterial solution was placed in a 1.5 mL centrifuge tube and centrifuged at 6,800×g for 3 minutes, and the supernatant was removed with a micropipette. The resulting cell pellets were well suspended, 100 μL of P1 buffer containing 10 mg/mL of egg white lysozyme (Wako Pure Chemical Industries, Ltd.) was added, and then the cell pellets were incubated at 37° C. for 5 minutes. Centrifugation was performed at 6,800×g for 3 minutes, the supernatant was removed with a micropipette, and the plasmids were purified with automated system QIAcube by QIAprep Spin Miniprep Kit (Qiagen N.V.) and finally eluted into 30 μL of TE buffer.

[0386] A total of 97 types of plasmid DNAs (plasmids derived from Bacillus subtilis) including the plasmids derived from the 96 colonies described above and the seed plasmid #9 were obtained. These plasmids were introduced into HeLa cells to evaluate viral particle production.

[0387] 0.17×10⁶ HeLa cells were seeded in a 24-well plate the day before transfection. After 22 hours, the medium was replaced with 0.38 mL of DMEM medium (2% FBS, 1% penicillin/streptomycin), and culture was performed at 37° C. and 5% CO₂ for 2 hours. 0.10 μg of pAAV-GFP plasmid, 0.13 μg of pR2C1 plasmid, 0.33 μg of pHelper library plasmid, and 20 μL of a transfection solution obtained by mixing each of PEI pro and DMEM medium in an amount of 1-fold were added thereto. After culturing at 37° C. and 5% CO₂ for 72 hours, the supernatant was recovered and the number of genomic copies of rAAV was quantified.

Evaluation of rAAV

[0388] A sample prepared by subjecting the supernatant to DNaseI treatment for 30 minutes and reacting the treated supernatant at 95° C. for 10 minutes was diluted 1,000 times and subjected to qPCR. Here, primer sequences of 5′-CATCAATGGGCGTGGATAGC-3′ (SEQ ID NO: 213) and 5′-GGAGTTGTTACGACATTTTGGAAA-3′ (SEQ ID NO: 314) targeting the CMV promoter were used. As the reaction conditions, after 10 minutes at 95° C., 40 cycles of 95° C./15 seconds, 55° C./5 seconds, and 72° C./30 seconds were repeated.

[0389] The results are illustrated in FIG. 12. Clones with improved Titer were identified compared to the seed plasmid #9 composed of the WT promoter.

Identification of Selected rAAV Promoters

[0390] The clone (pHelper clone #60) having the largest viral genome amount was selected, and the base sequence of the plasmid used for the viral vector production was determined as follows to identify the combination of promoters. Plasmid DNAs were fragmented using Illumina prep (Illumina, Inc.), and base sequence analysis was performed using Miseq (Illumina, Inc.).

### Example 5: Promoter Library of pDuaI (Helper/Rep/Cap) Gene Expression Plasmids

### Design of Seed Plasmids for CombiOGAB Method

[0391] In the same manner as that of Example 4, five types of pDuaI seed plasmids (SEQ ID NOs: 242 to 246) were designed as shown in Table 6, each pDuaI seed plasmid loading the VA, E4, and E2A regions, the serotype 2 Rep gene, and the serotype 1 Cap, which are commonly used for helper plasmids. These plasmids are capable of producing AAV in HEK293 and HEK293T cells. In addition to the wild-type promoter of each of E2A, E4orf6, Rep2, and Cap1, any of the sequences obtained from three types of promoters (UBC promoter, mPGK promoter, and EF1A promoter) having different expression intensities was linked to each gene region (see also FIG. 13).

TABLE 6

| | | 2nd | 3rd | 4th | 5th |
|---|---|---|---|---|---|
| | | E2A-SV40 | EAorf6-bGH | Cap1-hGH | Rep2-HSV |
| Seed plasmid | 1st | polyA | polyA | polyA | polyA |
| No. | VA | signal | signal | signal | signal |
| #14 | WT_endogenous | WT_E2A | WT_E4 | WT_Cap1 | WT_Rep2 |
| | promoter | promoter | promoter | promoter | promoter |
| #15 | WT_endogenous | WT_E2A | EF1A | mPGK | UBC |
| | promoter | promoter | promoter | promoter | promoter |
| #16 | WT_endogenous | UBC | WT_E4 | EF1A | mPGK |
| | promoter | promoter | promoter | promoter | promoter |
| #17 | WT_endogenous | mPGK | UBC | WT_Cap1 | EF1A |
| | promoter | promoter | promoter | promoter | promoter |
| #18 | WT_endogenous | EF1A | mPGK | UBC | WT_Rep2 |
| | promoter | promoter | promoter | promoter | promoter |

[0392] Here, VA, each gene, and the poly A signal sequence downstream thereof are commonly designed between seed plasmids, and the target of the combinatorial library by the CombiOGAB method is a promoter portion. A restriction enzyme SfiI recognition site (5′-GGCCnNNN/nGGCC-3′; n and N are any of A, T, G, and C; capital letters N are 3′ end protruding portions) was located at the boundary of each region. Each 3′ end protruding of the three bases generated when each SfiI recognition site was cleaved was designed to be the only sequence in the plasmid. In the combinatorial library production by the CombiOGAB method, the order and direction of the adjacent DNA fragments are specified by the complementarity of the protruding portions. Thus, the seed plasmids were designed so that, for all types of seed plasmids, the corresponding unit DNAs at the positions of the respective genes had the same protruding sequence as illustrated in FIG. 13. Although some genes to be used naturally contain SfiI recognition sequences, such SfiI recognition sequences were deleted by replacing them with synonymous codons in the case of protein coding sequences and changing the sequences in the case of non-coding regions such as within ITR sequences.

### Preparation of Integrated Nucleic Acids for OGAB Method

[0393] The five cloning plasmids pBR-delTypeIIS-1st, pBR-delTypeIIS-2nd, pBR-delTypeIIS-3rd, pBR-delTypeIIS-4th, and pBR-delTypeIIS-5th constructed in Example 4 were used.

[0394] Among other necessary DNAs, DNAs constructed in Example 4 were used as they were. In the same manner as that of Example 4, DNAs not described in Example 4 were obtained from appropriate template DNA by a PCR method, and then cloned into pTAKN-2. For confirmation and amplification of each of promoter fragments of Cap2 and Rep1, the sets of primers set forth in SEQ ID NOs: 215 and 216 and SEQ ID NOs: 217 and 218 were used, respectively. For confirmation and amplification of ORFs of Cap2 and Rep1, the sets of primers set forth in SEQ ID NOs: 219 and 220 and SEQ ID NOs: 221 and 222 were used, respectively. As in Example 4, OGAB block plasmids were constructed to prepare the DNA fragments listed in Table 6.

### Construction of Seed Plasmids

[0395] The reaction was performed by the OGAB method in the same manner as that of Example 4. Plasmids with the correct structure were constructed and prepared in large quantities by ultracentrifugation.

### CombiOGAB Library

[0396] Four seed plasmids #15, #16, #17, and #18 obtained by mass preparation were cleaved with the restriction enzyme SfiI, T4DNA ligase was added, the mixture was mixed and then reacted at 37° C. for 2 hours, and then the resultant was used for transformation. As a result of culturing overnight at 37° C. at an LB portion rate containing tetracycline, about 30,000 colonies were obtained.

Production of rAAV from pDuaI Promoter Library

[0397] As in Example 4, 96 of these colonies were randomly selected and the plasmids were purified. A total of 97 types of plasmid DNAs (plasmids derived from Bacillus subtilis) obtained by adding seed plasmid #14 thereto were introduced into HEK293 cells, and viral particle production was evaluated.

[0398] 0.225×10⁶ HEK293 cells were seeded in a 24-well plate the day before transfection. After 22 hours, the medium was replaced with 0.38 mL of DMEM medium (2% FBS, 1% penicillin/streptomycin), and culture was performed at 37° C. and 5% CO₂ for 2 hours. 0.10 μg of pAAV-GFP plasmid, 0.34 μg of pDuaI library plasmid, and 20 μL of a transfection solution obtained by mixing each of PEI pro and DMEM medium in an amount of 1-fold were added thereto. As a control, 0.10 μg of pAAV-GFP plasmid, 0.12 μg of pR2C1 plasmid, 0.22 μg of pHelper plasmid, and 20 μL of a transfection solution obtained by mixing each of PEI pro and DMEM medium in an amount of 1-fold were added. After culturing at 37° C. and 5% CO₂ for 72 hours, the supernatant was recovered and the number of genomic copies of rAAV was quantified.

Evaluation of rAAV

[0399] A sample prepared by subjecting the supernatant to DNaseI treatment for 30 minutes and reacting the treated supernatant at 95° C. for 10 minutes was diluted 1,000 times and subjected to qPCR. Here, primer sequences of 5′-CATCAATGGGCGTGGATAGC-3′ (SEQ ID NO: 213) and 5′-GGAGTTGTTACGACATTTTGGAAA-3′ (SEQ ID NO: 214) targeting the CMV promoter were used. As the reaction conditions, after 10 minutes at 95° C., 40 cycles of 95° C./15 seconds, 55° C./5 seconds, and 72° C./30 seconds were repeated.

[0400] The results are illustrated in FIG. 14. Clones with improved Titer were identified compared to the seed plasmid #14 composed of the WT promoter.

Identification of Selected rAAV Promoters

[0401] The clone (pDuaI clone #15) having the largest viral genome amount was selected, and the base sequence of the plasmid used for the viral vector production was determined as follows to identify the combination of promoters. Plasmid DNAs were fragmented using Illumina prep (Illumina, Inc.), and base sequence analysis was performed using Miseq (Illumina, Inc.).

[0402] Each plasmid used in Examples above was obtained or produced as follows.

pAAV-GFP

[0403] (pAAV[Exp]-CMV>EGFP:WPRE) purchased from VectorBuilder Inc.

### VB3_pAAV-EF1A-dTomato-T2A-Hygro(VB)

[0404] (pAAV[Exp]-EF1A>dTomato (ns): T2A: Hygro) purchased from VectorBuilder Inc.

### VB5_pAAV-mPGK-mCherry-oPRE(VB)

[0405] (pAAV[Exp]-mPGK>mCherry:oPRE) purchased from VectorBuilder Inc.

### VB6_pAAV-UBC-EBFP(VB)

[0406] (pAAV[Exp]-UBC>EBFP) purchased from VectorBuilder Inc.

### VB7_VB211117-TRE-tTA

[0407] (pRP[Exp]-TRE>tTA) purchased from VectorBuilder Inc.
   6230_pAAV-CMV
[0408] (6230_pAAV-CMV) purchased from Takara Bio Inc.

### SYNp34_pHelper

[0409] pUC19 vector plasmid (Addgene: #500005) was treated with restriction enzymes (AatII, PciI). The following three fragments (VA fragment, E4 fragment, and E2A fragment) were inserted thereinto using InFusion. VA fragments were prepared using the genome of Ad5 (see ATCC VR-1516) as a template and using the following primers: primer sequences 5′-ttagtaagcttccctcctgacgcggtaggaggaggggagggtgccctgcatg-3′ (SEQ ID NO: 223) and 5′-ccttttgctcacatgtcaattggtagatgtacctggacatccaggtgatgccggcg-3′ (SEQ ID NO: 224). E4 fragments were prepared using the genome of Ad5 as a template and using the following primers: primer sequences 5′-tgtacaGGCGCGCCgaattcgttttagggcggagtaacttgtatgtgttgggaattgtag-3′ (SEQ ID NO: 225) and 5′-agggaagcttactaaacggtacacaggaaacaggagacacaactccaagtg-3′ (SEQ ID NO: 226). E2A fragments were prepared using the genome of Ad5 as a template and using the following primers: primer sequences 5′-gaaaagtgccacctgacgtcgcggccgcGCGATCGCggtacccaactccatgctcaacagtccccaggtacagccc-3′ (SEQ ID NO: 227) and 5′-gaattcGGCGCGCCtgtacagcccgggcgaccgcaccctgtgacgaaagccgcccgcaag-3′ (SEQ ID NO: 228).

### SYNp21_pR2C1

[0410] pUC19 vector plasmid (Addgene: #500005) was treated with restriction enzymes (AatII, PciI). The following three fragments (p5 gene fragment, AAV2 Rep fragment, and SV40 ori fragment) were inserted thereinto using InFusion. The p5 gene fragment was prepared using the following primers: primer sequences 5′-gaaaagtgccacctgacgtcgcggccgcggaggggtggagtcgtgacgtgaattacgtcatagggttagggaggtcctgtattag aggtcacgtgagtgttttgcgac-3′ (SEQ ID NO: 229) and 5′-gttcaaacctcccgcttcaaaatggagaccctgcgtgctcactcgggcttaaatacccagcgtgaccacatggtgtcgcaaaatgtc gcaaaacactca-3′ (SEQ ID NO: 230). The AAV2 Rep fragment was prepared using pRC2-mi342 (Takara Bio Inc.) as a template using the following primers: primer sequences 5′-gcgggaggtttgaacgcgcagccgccATGCCGGGGTTTTAC-3′ (SEQ ID NO: 231) and 5′-GATCGCAGCGCTatttaaatcatTTATTGTTCAAAGAT-3′ (SEQ ID NO: 232). The SV40 ori fragment was prepared using SV40 ori gene sequence (Toyobo Co., Ltd.) as a template and using the following primers: primer sequences 5′-aatAGCGCTGCGATCGCggcctccaaaaaagc-3′ (SEQ ID NO: 233) and 5′-ccttttgctcacatgtcaattgatcccgcccctaact-3′ (SEQ ID NO: 234). The resulting plasmids were treated with restriction enzymes (SwaI, AfeI). An AAV1Cap fragment was inserted thereinto using InFusion. The AAV1 Cap fragment was prepared using pRC1 (Takara Bio Inc.) as a template using the following primers: primer sequences 5′-AACAATAAatgatttaaatcagg-3′ (SEQ ID NO: 235) and 5′-ggccGCGATCGCAGCGCTgtagccatggaaactagata-3′ (SEQ ID NO: 236).

### SYNp177_AIO_Helper-Ad5_R2C1_EGFP_wtE1_km

[0411] The plasmids were produced by gene synthesis and the OGAB method. The genes contained in these plasmids and their order are shown below: 5′ ITR2 (VectorBuilder Inc.), CMV promoter (VectorBuilder Inc.), EGFP (VectorBuilder Inc.), WPRE (VectorBuilder Inc.), hGH polyA signal (Takara Bio Inc.), 3′ ITR2 (VectorBuilder Inc.), E2A (Ad5), E4 (Ad5), VA (Ad5), Cap (AAV1), Rep (AAV2), p5 (AAV2), E1A (Ad5), E1B (Ad5), pUC ori (pUC19), kanamycin resistance gene (VectorBuilder Inc.), HSV TK PolyA signal (Takara Bio Inc.), puromycin resistance gene (VectorBuilder Inc.), and mPGK promoter (VectorBuilder Inc.). Here, an exemplary procedure of the OGAB method is shown below. The target introduced nucleic acid is divided into fragments of about 1 kb or less. The ends of each fragment are designed to be unique and complementary only to the particular fragment. Primers are designed for each of the fragments thus designed, and each fragment is prepared by PCR. Each fragment is cloned into a vector plasmid, and Escherichia coli transformation is performed using each vector plasmid to obtain a clone containing the correct sequence for each fragment. Plasmids are purified from these Escherichia coli clones and the DNA concentration of the plasmid solution is determined. The respective plasmid solutions are fractionated and mixed so that the amounts of the plasmids of the respective fragments are equal. A restriction enzyme is added to the mixed solution to generate DNA fragments each having an end that is unique and complementary only to a specific fragment. Thereafter, the OGAB integration vector cleaved with the same restriction enzyme is added to the solution in such an amount that the molar concentration is matched with that of each fragment, ligation is performed, and pairs of fragments having complementary ends (including fragments of the OGAB accumulation vector) are linked. The resultant is added to Bacillus subtilis competent cells and cultured, and then, transformed colonies are obtained. The plasmids having the target structure are recovered from these colonies.

### SYNp44-2_pHelper (Ad5ΔSfiI)_km.

[0412] The plasmids were produced by gene synthesis and the OGAB method. The genes contained in these plasmids and their order are shown below: E4 (Ad5), E2A (Ad5) ΔSfiI, VA (Ad5), pUC ori (pUC19), kanamycin resistance gene (VectorBuilder Inc.), and AmpR promoter (pUC19).

### (Note)

[0413] Although the present disclosure has been illustrated using preferred embodiments of the present disclosure as described above, it is understood that the scope of the present disclosure should be interpreted only by the claims. It is understood that the patents, patent applications, and documents cited As used herein are to be incorporated by reference As used herein in the same manner as the contents are specifically described As used herein.

[0414] The present application claims priority to Japanese Patent Application No. 2022-76058 filed to the Japan Patent Office on May 2, 2022. The entire content thereof is incorporated herein by reference.

### INDUSTRIAL APPLICABILITY

[0415] According to the present disclosure, it is possible to efficiently produce various virus-derived construct plasmids, and virus-derived construct plasmids having improved performance can be efficiently obtained.

### SEQUENCE LISTING

1. A method for producing a virus-derived construct plasmid, the method comprising:
a step of preparing a set of starting plasmids containing at least of a part of nucleic acid sequences required to construct a virus-derived construct, the set of starting plasmids including a set of corresponding alternative unit nucleic acids, and the set of corresponding alternative unit nucleic acids including at least one set of corresponding alternative unit nucleic acids containing different nucleic acid sequences;
a step of treating the set of starting plasmids with a restriction enzyme and preparing a mixed solution containing cleaved alternative unit nucleic acid fragments;
a step of ligating the cleaved alternative unit nucleic acid fragments to form an integrated nucleic acid; and
a step of bringing the integrated nucleic acid into contact with a transformed organism to form a virus-derived construct plasmid.

2. The method according to claim 1, wherein a population of virus-derived construct plasmids is produced.

3. The method according to claim 1, wherein at least one of the sets of starting plasmids contains a transcriptional start sequence that functions in an animal cell, and a virus-derived construct plasmid containing the transcriptional start sequence that functions in an animal cell is produced.

4. The method according to claim 1, wherein the set of starting plasmids includes three or more types of starting plasmids.

5. The method according to claim 1, wherein the set of corresponding alternative unit nucleic acids includes at least two sets of corresponding alternative unit nucleic acids containing different nucleic acid sequences.

6. The method according to claim 1, further comprising a step of selecting a virus-derived construct plasmid having an excellent desired function from a population of the formed virus-derived construct plasmids.

7. The method according to claim 6, wherein the desired function is an amount of virus-derived construct produced.

8. The method according to claim 6, wherein the desired function is an amount of impurity mixed in a target virus-derived construct composition.

9. The method according to claim 8, wherein the impurity is selected from a coat protein that does not contain a nucleic acid sequence, a coat protein that contains an incomplete nucleic acid sequence, an incomplete coat protein, and an incomplete nucleic acid sequence.

10. The method according to claim 6, wherein the desired function is a purity of a target virus-derived construct in a target virus-derived construct composition.

11. The method according to claim 6, further comprising a step of preparing a virus-derived construct plasmid containing a combination of parallel alternative unit nucleic acids of the selected virus-derived construct plasmid.

12. The method according to claim 1, wherein each of the sets of starting plasmids contains a nucleic acid sequence required to construct a virus-derived construct.

13. The method according to claim 1, wherein at least of a part of the starting plasmids are plasmids produced by the method according to claim 1.

14. The method according to claim 1, wherein the set of corresponding alternative unit nucleic acids includes at least two sets of corresponding alternative unit nucleic acids containing a nucleic acid sequence encoding at least of a part of different subtypes of the same gene.

15. The method according to claim 1, wherein each of the sets of starting plasmids contains three or more types of alternative unit nucleic acids containing at least of a part of the nucleic acid sequences required to construct a virus-derived construct.

16. The method according to claim 1, wherein the step of ligating to form the integrated nucleic acid includes adding a barcode nucleic acid.

17. The method according to claim 1, wherein each of the sets of starting plasmids contains the nucleic acid sequence required to construct a virus-derived construct of about 10 kb or more.

18. The method according to claim 1, wherein the nucleic acid sequence required to construct a virus-derived construct includes:
(A) a nucleic acid sequence including a terminal repeat;
(B) a nucleic acid sequence encoding a packaging factor;
(C) a nucleic acid sequence encoding a structural protein; and
(D) a nucleic acid sequence encoding a functional cofactor.

19. The method according to claim 1, wherein the set of corresponding alternative unit nucleic acids includes a set of corresponding alternative unit nucleic acids encoding promoters whose types or directions are different.

20. The method according to claim 1, wherein the set of corresponding alternative unit nucleic acids includes a set of corresponding alternative unit nucleic acids containing a drug-responsive promoter and containing different nucleic acid sequences encoding a promoter.

21. The method according to claim 20, wherein the promoter includes a drug-responsive promoter.

22. The method according to claim 1, wherein the set of corresponding alternative unit nucleic acids includes at least two sets of corresponding alternative unit nucleic acids containing different nucleic acid sequences selected from:
(A) a nucleic acid sequence including a terminal repeat;
(B) a nucleic acid sequence encoding a packaging factor;
(C) a nucleic acid sequence encoding a structural protein;
(D) a nucleic acid sequence encoding a functional cofactor;
(E) a nucleic acid sequence encoding a promoter;
(F) a nucleic acid sequence encoding a desired gene; and
(G) a nucleic acid sequence involved in host cell biosynthesis.

23. The method according to claim 22, wherein the nucleic acid sequence involved in host cell biosynthesis contains a gene selected from the group consisting of SV40 Large T antigen (SV40LTA), TAX, Kras, Myc, MIR17HG, BCL-2, BCL-XL, PDIA2, XBP1, HSPA5, pyruvate carboxylase (PC), PDK, HIF1A, NRF2, and CPSF6.

24. The method according to claim 1, wherein the set of corresponding alternative unit nucleic acids includes at least two sets of corresponding alternative unit nucleic acids containing different nucleic acid sequences encoding a desired gene.

25. The method according to claim 24, wherein the set of corresponding alternative unit nucleic acids includes a set of corresponding alternative unit nucleic acids containing different nucleic acid sequences encoding a desired gene, and a set of corresponding alternative unit nucleic acids that are located adjacently upstream thereof and contain different nucleic acid sequences encoding a promoter.

26. The method according to claim 24, wherein the starting plasmid contains a nucleic acid sequence including two terminal repeats, and an alternative unit nucleic acid encoding the desired gene is present between the nucleic acid sequences including two terminal repeats.

27. The method according to claim 1, wherein the virus-derived construct is selected from a viral vector, a virus-like particle (VLP), an oncolytic virus, and a viral replicon.

28. The method according to claim 1, wherein the virus-derived construct is a virus-derived construct of a virus selected from the group consisting of an alphavirus, a vaccinia virus, a measles virus, an influenza virus, a vesicular stomatitis virus, a coronavirus, a Sindbis virus, a Semliki Forest virus, a herpes simplex virus, a retrovirus, a lentivirus, a rabies virus, a Sendai virus, an adeno-associated virus, an adenovirus, a reovirus, a coxsackievirus, and a Newcastle disease virus.

29. The method according to claim 1, wherein the virus-derived construct is a virus-derived construct of a virus selected from the group consisting of an adeno-associated virus, an adenovirus, a retrovirus, a lentivirus, a herpes simplex virus, and a Sendai virus.

30. The method according to claim 1, wherein the virus-derived construct is a virus-derived construct of a virus selected from the group consisting of an adeno-associated virus or a lentivirus.

31. The method according to claim 1, wherein the virus-derived construct is a viral vector of an adeno-associated virus.

32. The method according to claim 31, wherein the set of corresponding alternative unit nucleic acids includes a set of corresponding alternative unit nucleic acids containing different inverted terminal repeats (ITRs) derived from any of adeno-associated virus serotypes 1 to 12 and variants thereof.

33. The method according to claim 31, wherein the starting plasmid contains a promoter, a desired gene, and a terminator from upstream between a 5′ ITR and a 3′ ITR.

34. The method according to claim 31, wherein the set of corresponding alternative unit nucleic acids includes a set of corresponding alternative unit nucleic acids containing different nucleic acid sequences encoding a functional cofactor derived from at least one of an adenovirus, a herpes virus, a papilloma virus, a bocavirus, and a simian virus.

35. The method according to claim 34, wherein the set of corresponding alternative unit nucleic acids includes a set of corresponding alternative unit nucleic acids containing different nucleic acid sequences encoding a functional cofactor derived from any of adenovirus serotypes 1 to 52 and variants thereof.

36. The method according to claim 34, wherein the functional cofactor includes at least one of adenoviruses E1A, E1B, E2A, E4, and VA, herpes viruses UL5, UL8, UL30, UL42, UL52, ICP0, ICP4, ICP8, and ICP22, papilloma viruses E1, E2, and E6, bocaviruses NP1, NS2, NS4, and BocaSR, and simian virus Large T antigen.

37. The method according to claim 34, wherein the set of corresponding alternative unit nucleic acids includes a set of corresponding alternative unit nucleic acids containing different nucleic acid sequences encoding the functional cofactor, and a set of corresponding alternative unit nucleic acids that are located adjacently upstream thereof and contain different nucleic acid sequences encoding a promoter.

38. The method according to claim 31, wherein the starting plasmid contains E2A, E4, and VA.

39. The method according to claim 31, wherein the set of corresponding alternative unit nucleic acids includes a set of corresponding alternative unit nucleic acids containing different nucleic acid sequences encoding rep.

40. The method according to claim 39, wherein the rep includes at least one of rep78, rep76, rep52, and rep40.

41. The method according to claim 39, wherein the set of corresponding alternative unit nucleic acids includes a set of corresponding alternative unit nucleic acids containing different nucleic acid sequences encoding the rep, and a set of corresponding alternative unit nucleic acids that are located adjacently upstream thereof and contain different nucleic acid sequences encoding a promoter.

42. The method according to claim 39, wherein the set of corresponding alternative unit nucleic acids encoding rep includes a set of corresponding alternative unit nucleic acids containing different nucleic acid sequences derived from any of adeno-associated virus serotypes 1 to 12 and variants thereof.

43. The method according to claim 31, wherein the set of corresponding alternative unit nucleic acids includes a set of corresponding alternative unit nucleic acids containing different nucleic acid sequences encoding cap.

44. The method according to claim 43, wherein the cap includes at least one of VP1, VP2, VP3, AAP, and MAAP.

45. The method according to claim 43, wherein the set of corresponding alternative unit nucleic acids includes a set of corresponding alternative unit nucleic acids containing different nucleic acid sequences encoding the cap, and a set of corresponding alternative unit nucleic acids that are located adjacently upstream thereof and contain different nucleic acid sequences encoding a promoter.

46. The method according to claim 43, wherein the set of corresponding alternative unit nucleic acids encoding cap includes a set of corresponding alternative unit nucleic acids containing different nucleic acid sequences derived from any of adeno-associated virus serotypes 1 to 12 and variants thereof.

47. The method according to claim 31, wherein the starting plasmid contains a 5′ ITR, a promoter, a desired gene, a 3′ ITR, rep, cap, and a functional cofactor.

48. The method according to claim 31, wherein the starting plasmid contains a 5′ ITR, a 3′ ITR, rep, and cap, one of the rep and the cap is located downstream of a region sandwiched between the 5′ ITR and the 3′ ITR, and the other one of the rep and the cap is located upstream of the region sandwiched between the 5′ ITR and the 3′ ITR.

49. The method according to claim 31, wherein the starting plasmid contains two ITRs and another portion of the nucleic acid sequence required to construct a virus-derived construct, and the another portion is outside a region sandwiched between the two ITRs.

50. The method according to claim 31, wherein the starting plasmid contains a 5′ ITR, a promoter, a desired gene, a 3′ ITR, rep, cap, and a functional cofactor in this order.

51. The method according to claim 31, wherein the starting plasmid contains a first promoter, a first rep, a second promoter, a second rep, a third promoter, and cap in this order.

52. The method according to claim 1, wherein the virus-derived construct is a viral vector of a lentivirus.

53. The method according to claim 52, wherein the set of corresponding alternative unit nucleic acids includes a set of corresponding alternative unit nucleic acids containing different long terminal repeats (LTRs) derived from a lentivirus or variants thereof.

54. The method according to claim 52, wherein the starting plasmid contains a promoter, a desired gene, and a terminator from upstream between a 5′ LTR and a 3′ LTR.

55. The method according to claim 54, wherein the starting plasmid contains two or more sets of the promoter, the desired gene, and the terminator.

56. The method according to claim 52, wherein the set of corresponding alternative unit nucleic acids includes a set of corresponding alternative unit nucleic acids containing different nucleic acid sequences encoding a functional cofactor selected from tat and rev.

57. The method according to claim 56, wherein the set of corresponding alternative unit nucleic acids includes a set of corresponding alternative unit nucleic acids containing different nucleic acid sequences encoding the functional cofactor, and a set of corresponding alternative unit nucleic acids that are located adjacently upstream thereof and contain different nucleic acid sequences encoding a promoter.

58. The method according to claim 52, wherein the set of corresponding alternative unit nucleic acids includes a set of corresponding alternative unit nucleic acids containing different nucleic acid sequences encoding a structural protein selected from gag, pol, VSV-G, and env.

59. The method according to claim 58, wherein the set of corresponding alternative unit nucleic acids includes a set of corresponding alternative unit nucleic acids containing different nucleic acid sequences encoding the structural protein, and a set of corresponding alternative unit nucleic acids that are located adjacently upstream thereof and contain different nucleic acid sequences encoding a promoter.

60. The method according to claim 1, wherein the virus-derived construct is a viral vector of an adenovirus.

61. The method according to claim 60, wherein the set of corresponding alternative unit nucleic acids includes a set of corresponding alternative unit nucleic acids containing different inverted terminal repeats (ITRs) derived from an adenovirus.

62. The method according to claim 60, wherein the starting plasmid contains a promoter, a desired gene, and a terminator from upstream between a 5′ ITR and a 3′ ITR.

63. The method according to claim 60, wherein the starting plasmid contains two or more sets of the promoter, the desired gene, and the terminator.

64. The method according to claim 60, wherein the set of corresponding alternative unit nucleic acids includes a set of corresponding alternative unit nucleic acids containing different nucleic acid sequences encoding a structural protein selected from L1, L2, L3, L4, and L5.

65. The method according to claim 64, wherein the set of corresponding alternative unit nucleic acids includes a set of corresponding alternative unit nucleic acids containing different nucleic acid sequences encoding the structural protein, and a set of corresponding alternative unit nucleic acids that are located adjacently upstream thereof and contain different nucleic acid sequences encoding a promoter.

66. The method according to claim 64, wherein the set of corresponding alternative unit nucleic acids encoding a structural protein includes a set of corresponding alternative unit nucleic acids containing different nucleic acid sequences derived from any of adenovirus serotypes 1 to 52 and variants thereof.

67. The method according to claim 60, wherein the set of corresponding alternative unit nucleic acids includes a set of corresponding alternative unit nucleic acids containing different nucleic acid sequences encoding a functional cofactor selected from E1A, E1B, E2A, E2B, and E4.

68. The method according to claim 67, wherein the set of corresponding alternative unit nucleic acids includes a set of corresponding alternative unit nucleic acids containing different nucleic acid sequences encoding the functional cofactor, and a set of corresponding alternative unit nucleic acids that are located adjacently upstream thereof and contain different nucleic acid sequences encoding a promoter.

69. The method according to claim 67, wherein the set of corresponding alternative unit nucleic acids encoding a functional cofactor includes a set of corresponding alternative unit nucleic acids containing different nucleic acid sequences derived from any of adenovirus serotypes 1 to 52 and variants thereof.

70. The method according to any one of claims 1 to 69, wherein the virus-derived construct plasmid enables production of a virus-derived construct in a producer cell into which the virus-derived construct plasmid is introduced alone.

71. A method for constructing a virus-derived construct plasmid library by performing the method according to any one of claims 1 to 69.

72. A method for constructing a virus-derived construct plasmid library by performing the method according to any one of claims 1 to 69, wherein the set of corresponding alternative unit nucleic acids includes a plurality of sets of corresponding alternative unit nucleic acids containing different nucleic acid sequences, and provides 64 or more combinations of parallel alternative unit nucleic acids.

73. A virus-derived construct plasmid or a virus-derived construct plasmid library produced by the method according to any one of claims 1 to 69.

74. A virus-derived construct plasmid library comprising a virus-derived construct plasmid containing three or more alternative unit nucleic acids as a series of parallel alternative unit nucleic acids, wherein the virus-derived construct plasmid library contains a plurality of sets of corresponding alternative unit nucleic acids containing different nucleic acid sequences, and the parallel alternative unit nucleic acids on each virus-derived construct plasmid of the plurality of sets of corresponding alternative unit nucleic acids containing different nucleic acid sequences have a length of about 10 kb or more.

75. A virus-derived construct plasmid library comprising a plurality of virus-derived construct plasmids, wherein different portions in a combination in the plurality of virus-derived construct plasmids contain a nucleic acid sequence that is a promoter or a functional cofactor.

76. The virus-derived construct plasmid library according to any one of claims 73 to 75, wherein the plurality of virus-derived construct plasmids in the virus-derived construct plasmid library contain elements that constitute the different portions in the combination, the elements being differ from one another in a serotype of a virus from which they are derived.

77. The virus-derived construct plasmid library according to any one of claims 73 to 76, wherein the elements that constitute the different portions in the combination of the plurality of virus-derived construct plasmids in the virus-derived construct plasmid library contain promoters, and the promoters in the plurality of virus-derived construct plasmids include promoters operably linked to genes that are different from each other in nature.

78. The virus-derived construct plasmid library according to claim 74, wherein the plurality of sets of corresponding alternative unit nucleic acids containing different nucleic acid sequences include a set of corresponding alternative unit nucleic acids containing at least one different nucleic acid sequence of:
(A) a nucleic acid sequence including a terminal repeat;
(B) a nucleic acid sequence encoding a packaging factor;
(C) a nucleic acid sequence encoding a structural protein; and
(D) a nucleic acid sequence encoding a functional cofactor.

79. The virus-derived construct plasmid library according to claim 74, wherein each virus-derived construct plasmid contains:
(A) a nucleic acid sequence including a terminal repeat;
(B) a nucleic acid sequence encoding a packaging factor;
(C) a nucleic acid sequence encoding a structural protein; and
(D) a nucleic acid sequence encoding a functional cofactor.

80. The virus-derived construct plasmid library according to claim 74, wherein the plurality of sets of corresponding alternative unit nucleic acids containing different nucleic acid sequences contain an alternative unit nucleic acid having a GC content of 75% or more.

81. The virus-derived construct plasmid library according to claim 74, wherein the plurality of sets of corresponding alternative unit nucleic acids containing different nucleic acid sequences include a plurality of sets of corresponding alternative unit nucleic acids that allow for 64 or more different parallel alternative unit nucleic acid combinations, and each virus-derived construct plasmid contains the same number of parallel alternative unit nucleic acids.

82. The virus-derived construct plasmid library according to claim 74, wherein each virus-derived construct plasmid contains a barcode nucleic acid sequence.

83. A virus-derived construct plasmid contained in the virus-derived construct plasmid library according to claim 74.

84. A method for producing a virus-derived construct, the method comprising:
a step of preparing a virus-derived construct plasmid by the method according to any one of claims 1 to 69; and
a step of introducing the virus-derived construct plasmid into a producer cell to form a virus-derived construct.

85. A method for producing a virus-derived construct library, the method comprising:
a step of preparing a population of virus-derived construct plasmids by the method according to any one of claims 1 to 69; and
a step of introducing the population of virus-derived construct plasmids into a producer cell and forming a virus-derived construct to construct a virus-derived construct library.

86. The method according to claim 85, wherein the step of introducing the virus-derived construct plasmid into the producer cell includes introducing a single virus-derived construct plasmid into a producer cell.

87. The method according to claim 85, wherein at least of a part of the nucleic acids contained in the virus-derived construct plasmid are incorporated into a chromosome of the producer cell.

88. A producer cell prepared by the method according to claim 85.

89. A virus-derived construct produced by the method according to claim 85.

90. A virus-derived construct-containing composition produced by the method according to claim 85.

The application's sequence listing, which the Patent Office published only in electronic form, follows.

SEQUENCE LISTING (246 sequences)

SEQ ID NO: 1 - DNA, 31103 bp, synthetic construct
  misc_feature 1..31103: note = seed plasmid 1
  source 1..31103: mol_type = other DNA
gcggccgccctgcaggcagctgcgcgctcgctcgctcactgaggccgcccgggcaaagcccgggcgtcgggcgacctttggtcgcccggcctcagtgagcgagcgagcgcgcagagagggagtggccaactccatcactaggggttcctggccttgatggccaattcgattcgattagggcctacttggcctaatagtaatcaattacggggtcattagttcatagcccatatatggagttccgcgttacataacttacggtaaatggcccgcctggctgaccgcccaacgacccccgcccattgacgtcaataatgacgtatgttcccatagtaacgccaatagggactttccattgacgtcaatgggtggagtatttacggtaaactgcccacttggcagtacatcaagtgtatcatatgccaagtacgccccctattgacgtcaatgacggtaaatggcccgcctggcattatgcccagtacatgaccttatgggactttcctacttggcagtacatctacgtattagtcatcgctattaccatggtgatgcggttttggcagtacatcaatgggcgtggatagcggtttgactcacggggatttccaagtctccaccccattgacgtcaatgggagtttgttttggcaccaaaatcaacgggactttccaaaatgtcgtaacaactccgccccattgacgcaaatgggcggtaggcgtgtacggtgggaggtctatataagcagagctggtttagtgaaccgtcagatgccaccatggtgagcaagggcgaggagctgttcaccggggtggtgcccatcctggtcgagctggacggcgacgtaaacggccacaagttcagcgtgtccggcgagggcgagggcgatgccacctacggcaagctgaccctgaagttcatctgcaccaccggcaagctgcccgtgccctggcccaccctcgtgaccaccctgacctacggcgtgcagtgcttcagccgctaccccgaccacatgaagcagcacgacttcttcaagtccgccatgcccgaaggctacgtccaggagcgcaccatcttcttcaaggacgacggcaactacaagacccgcgccgaggtgaagttcgagggcgacaccctggtgaaccgcatcgagctgaagggcatcgacttcaaggaggacggcaacatcctggggcacaagctggagtacaactacaacagccacaacgtctatatcatggccgacaagcagaagaacggcatcaaggtgaacttcaagatccgccacaacatcgaggacggcagcgtgcagctcgccgaccactaccagcagaacacccccatcggcgacggccccgtgctgctgcccgacaaccactacctgagcacccagtccgccctgagcaaagaccccaacgagaagcgcgatcacatggtcctgctggagttcgtgaccgccgccgggatcactctcggcatggacgagctgtacaagtaagggtggcatccctgtgacccctccccagtgcctctcctggccctggaagttgccactccagtgcccaccagccttgtcctaataaaattaagttgcatcattttgtctgactaggtgtccttctataatattatggggtggaggggggtggtatggagcaaggggcaagttgggaagacaacctgtagggcctgcggggtctattgggaaccaagctggagtgcagtggcacaatcttggctcactgcaatctccgcctcctgggttcaagcgattctcctgcctcagcctcccgagttgttgggattccaggcatgcatgaccaggctcagctaatttttgtttttttggtagagacggggtttcaccatattggccaggctggtctccaactcctaatctcaggtgatctacccaccttggcctcccaaattgctgggattacaggcgtgaaccactgctcccttccctgtccttaggaacccctagtgatggagttggccactccctctctgcgcgctcgctcgctcactgaggccgggcgaccaaaggtcgcccgacgcccgggctttgcccgggcggcctcagtgagcgagcgagcgcgcagctgcctgcaggggcctgattggccatccgtagatgtacctggacatccaggtgatgccggcggcggtggtggaggcgcgcggaaagtcgcggacgcggttccagatgttgcgcagcggcaaaaagtgctccatggtcgggacgctctggccggtgaggcgtgcgcagtcgttgacgctctagaccgtgcaaaaggagagcctgtaagcgggcactcttccgtggtctggtggataaattcgcaagggtatcatggcggacgaccggggttcgaaccccggatccggccgtccgccgtgatccatgcggttaccgcccgcgtgtcgaacccaggtgtgcgacgtcagacaacgggggagcgctccttttggcttccttccaggcgcggcggctgctgcgctagcttttttggccactggccgcgcgcggcgtaagcggttaggctggaaagcgaaagcattaagtggctcgctccctgtagccggagggttattttccaagggttgagtcgcaggacccccggttcgagtctcgggccggccggactgcggcgaacgggggtttgcctccccgtcatgcaagaccccgcttgcaaattcctccggaaacagggacgagccccttttttgcttttcccagatgcatccggtgctgcggcagatgcgcccccctcctcagcagcggcaagagcaagagcagcggcagacatgcagggcaccctccccttctcctaccgcgtcaggaggggcaacatccggtacccaactccatgcttaacagtccccaggtacagcccaccctgcgtcgcaaccaggaacagctctacagcttcctggagcgccactcgccctacttccgcagccacagtgcgcagattaggagcgccacttctttttgtcacttgaaaaacatgtaaaaataatgtactaggagacactttcaataaaggcaaatgtttttatttgtacactctcgggtgattatttaccccccacccttgccgtctgcgccgtttaaaaatcaaaggggttctgccgcgcatcgctatgcgccactggcagggacacgttgcgatactggtgtttagtgctccacttaaactcaggcacaaccatccgcggcagctcggtgaagttttcactccacaggctgcgcaccatcaccaacgcgtttagcaggtcgggcgccgatatcttgaagtcgcagttggggcctccgccctgcgcgcgcgagttgcgatacacagggttgcagcactggaacactatcagcgccgggtggtgcacgctggccagcacgctcttgtcggagatcagatccgcgtccaggtcctccgcgttgctcagggcgaacggagtcaactttggtagctgccttcccaaaaagggtgcatgcccaggctttgagttgcactcgcaccgtagtggcatcagaaggtgaccgtgcccggtctgggcgttaggatacagcgcctgcatgaaagccttgatctgcttaaaagccacctgagcctttgcgccttcagagaagaacatgccgcaagacttgccggaaaactgattggcaggacaggccgcgtcatgcacgcagcaccttgcgtcggtgttggagatctgcaccacatttcggccccaccggttcttcacgatcttggccttgctagactgctccttcagcgcgcgctgcccgttttcgctcgtcacatccatttcaatcacgtgctccttatttatcataatgctcccgtgtagacacttaagctcgccttcgatctcagcgcagcggtgcagccacaacgcgcagcccgtgggctcgtggtgcttgtaggttacctctgcaaacgactgcaggtacgcctgcaggaatcgccccatcatcgtcacaaaggtcttgttgctggtgaaggtcagctgcaacccgcggtgctcctcgtttagccaggtcttgcatacggccgccagagcttccacttggtcaggcagtagcttgaagtttgcctttagatcgttatccacgtggtacttgtccatcaacgcgcgcgcagcctccatgcccttctcccacgcagacacgatcggcaggctcagcgggtttatcaccgtgctttcactttccgcttcactggactcttccttttcctcttgcgtccgcataccccgcgccactgggtcgtcttcattcagccgccgcaccgtgcgcttacctcccttgccgtgcttgattagcaccggtgggttgctgaaacccaccatttgtagcgccacatcttctctttcttcctcgctgtccacgatcacctctggggatggcgggcgctcgggcttgggagaggggcgcttctttttctttttggacgcaatggccaaatccgccgtcgaggtcgatggccgcgggctgggtgtgcgcggcaccagcgcatcttgtgacgagtcttcttcgtcctcggactcgagacgccgcctcagccgcttttttgggggcgcgcggggaggcggcggcgacggcgacggggacgacacgtcctccatggttggtggacgtcgcgccgcaccgcgtccgcgctcgggggtggtttcgcgctgctcctcttcccgactggccatttccttctcctataggcagaaaaagatcatggagtcagtcgagaaggaggacagcctaaccgccccctttgagttcgccaccaccgcctccaccgatgccgccaacgcgcctaccaccttccccgtcgaggcacccccgcttgaggaggaggaagtgattatcgagcaggacccaggttttgtaagcgaagacgacgaggatcgctcagtaccaacagaggataaaaagcaagaccaggacgacgcagaggcaaacgaggaacaagtcgggcggggggaccaaaggcatggcgactacctagatgtgggagacgacgtgctgttgaagcatctgcagcgccagtgcgccattatctgcgacgcgttgcaagagcgcagcgatgtgcccctcgccatagcggatgtcagccttgcctacgaacgccacctgttctcaccgcgcgtaccccccaaacgccaagaaaacggcacatgcgagcccaacccgcgcctcaacttctaccccgtatttgccgtgccagaggtgcttgccacctatcacatctttttccaaaactgcaagatacccctatcctgccgtgccaaccgcagccgagcggacaagcagctggccttgcggcagggcgctgtcatacctgatatcgcctcgctcgacgaagtgccaaaaatctttgagggtcttggacgcgacgagaaacgcgcggcaaacgctctgcaacaagaaaacagcgaaaatgaaagtcactgtggagtgctggtggaacttgagggtgacaacgcgcgcctagccgtgctgaaacgcagcatcgaggtcacccactttgcctacccggcacttaacctaccccccaaggttatgagcacagtcatgagcgagctgatcgtgcgccgtgcacgacccctggagagggatgcaaacttgcaagaacaaaccgaggagggcctacccgcagttggcgatgagcagctggcgcgctggcttgagacgcgcgagcctgccgacttggaggagcgacgcaagctaatgatggccgcagtgcttgttaccgtggagcttgagtgcatgcagcggttctttgctgacccggagatgcagcgcaagctagaggaaacgttgcactacacctttcgccagggctacgtgcgccaggcctgcaaaatttccaacgtggagctctgcaacctggtctcctaccttggaattttgcacgaaaaccgcctcgggcaaaacgtgcttcattccacgctcaagggcgaggcgcgccgcgactacgtccgcgactgcgtttacttatttctgtgctacacctggcaaacggccatgggcgtgtggcagcaatgcctggaggagcgcaacctaaaggagctgcagaagctgctaaagcaaaacttgaaggacctatggacggccttcaacgagcgctccgtggccgcgcacctggcggacattatcttccccgaacgcctgcttaaaaccctgcaacagggtctgccagacttcaccagtcaaagcatgttgcaaaactttaggaactttatcctagagcgttcaggaattctgcccgccacctgctgtgcgcttcctagcgactttgtgcccattaagtaccgtgaatgccctccgccgctttggggtcactgctaccttctgcagctagccaactaccttgcctaccactccgacatcatggaagacgtgagcggtgacggcctactggagtgtcactgtcgctgcaacctatgcaccccgcaccgctccctggtctgcaattcgcaactgcttagcgaaagtcaaattatcggtacctttgagctgcagggtccctcgcctgacgaaaagtccgcggctccggggttgaaactcactccggggctgtggacgtcggcttaccttcgcaaatttgtacctgaggactaccacgcccacgagattaggttctacgaagaccaatcccgcccgccaaatgcggagcttaccgcctgcgtcattacccagggccacatccttggccaattgcaagccatcaacaaagcccgccaagagtttctgctacgaaagggacggggggtttacctggacccccagtccggcgaggagctcaacccaatccccccgccgccgcagccctatcagcagccgcgggcccttgcttcccaggatggcacccaaaaagaagctgcagctgccgccgccgccacccacggacgaggaggaatactgggacagtcaggcagaggaggttttggacgaggaggaggagatgatggaagactgggacagcctagacgaagcttccgaggccgaagaggtgtcagacgaaacaccgtcaccctcggtcgcattcccctcgccggcgccccagaaattggcaaccgttcccagcatcgctacaacctccgctcctcaggcgccgccggcactgcctgttcgccgacccaaccgtagatgggacaccactggaaccagggccggtaagtctaagcagccgccgccgttagcccaagagcaacaacagcgccaaggctaccgctcgtggcgcgggcacaagaacgccatagttgcttgcttgcaagactgtgggggcaacatctccttcgcccgccgctttcttctctaccatcacggcgtggccttcccccgtaacatcctgcattactaccgtcatctctacagcccctactgcaccggcggcagcggcagcggcagcaacagcagcggtcacacagaagcaaaggcgaccggatagcaagactctgacaaagcccaagaaatccacagcggcggcagcagcaggaggaggagcgctgcgtctggcgcccaacgaacccgtatcgacccgcgagcttagaaataggatttttcccactctgtatgctatatttcaacaaagcaggggccaagaacaagagctgaaaataaaaaacaggtctctgcgctccctcacccgcagctgcctgtatcacaaaagcgaagatcagcttcggcgcacgctggaagacgcggaggctctcttcagcaaatactgcgcgctgactcttaaggactagtttcgcgccctttctcaaatttaagcgcgaaaactacgtcatctccagcggccacacccggcgccagcacctgtcgtcagcgccattatgagcaaggaaattcccacgccctacatgtggagttaccagccacaaatgggacttgcggctggagctgcccaagactactcaacccgaataaactacatgagcgcgggaccccacatgatatcccgggtcaacggaatccgcgcccaccgaaaccgaattctcctcgaacaggcggctattaccaccacacctcgtaataaccttaatccccgtagttggcccgctgccctggtgtaccaggaaagtcccgctcccaccactgtggtacttcccagagacgcccaggccgaagttcagatgactaactcaggggcgcagcttgcgggcggctttcgtcacagggtgcggtcgcccgggcctagtgaatccacagaaactagcgaggtaagcacttactctatgtcttttacatggtcctgggaaagtggaaaatacaccactgaaacttttgctaccaactcttacaccttctcctacattgcccaggaataaagaatcgtgaacctgttgcatgttatgtttcaacgtgtttatttttcaattgcagaaaatttcaagtcatttttcattcagtagtatagccccaccaccacatagcttatattgatcaccgtaccttaatcaaactcacagaaccctagtattcaacctgccacctccctcccaacacacagagtacacagtcctttctccccggctggccttaaaaagcatcatatcatgggtaacagacatattcttaggtgttatattccacacggtttcctgtcgagccaaacgctcatcagtgatattaataaactccccgggcagctcgcttaagttcatgtcgctgtccagctgctgagccacaggctgctgtccaacttgcggttgctcaacgggcggcgaaggggaagtccacgcctacatgggggtagagtcataatcgtgcatcaggatagggcggtggtgctgcagcagcgcgcgaataaactgctgccgccgccgctccgtcctgcaggaatacaacatggcagtggtctcctcagcgatgattcgcaccgcccgcagcatgagacgccttgtcctccgggcacagcagcgcaccctgatctcacttaaatcagcacagtaactgcagcacagcaccacaatattgttcaaaatcccacagtgcaaggcgctgtatccaaagctcatggcggggaccacagaacccacgtggccatcataccacaagcgcaggtagattaagtggcgacccctcataaacacgctggacataaacattacctcttttggcatgttgtaattcaccacctcccggtaccatataaacctctgattaaacatggcgccatccaccaccatcctaaaccagctggccaaaacctgcccgccggctatgcactgcagggaaccgggactggaacaatgacagtggagagcccaggactcgtaaccatggatcatcatgctcgtcatgatatcaatgttggcacaacacaggcacacgtgcatacacttcctcaggattacaagctcctcccgcgtcagaaccatatcccagggaacaacccattcctgaatcagcgtaaatcccacactgcagggaagacctcgcacgtaactcacgttgtgcattgtcaaagtgttacattcgggcagcagcggatgatcctccagtatggtagcgcgggtctctgtctcaaaaggaggtaggcgatccctactgtacggagtgcgccgagacaaccgagatcgtgttggtcgtagtgtcatgccaaatggaacgccggacgtagtcatatttcctgaagcaaaaccaggtgcgggcgtgacaaacagatctgcgtctccggtctcgtcgcttagctcgctctgtgtagtagttgtagtatatccactctctcaaagcatccaggcgccccctggcttcgggttctatgtaaactccttcatgcgccgctgccctgataacatccaccaccgcagaataagccacacccagccaacctacacattcgttctgcgagtcacacacgggaggagcgggaagagctggaagaaccatgttttttttttttttattccaaaagattatccaaaacctcaaaatgaagatctattaagtgaacgcgctcccctccggtggcgtggtcaaactctacagccaaagaacagataatggcatttgtaagatgttgcacaatggcttccaaaaggcaaactgccctcacgtccaagtggacgtaaaggctaaacccttcagggtgaatctcctctataaacattccagcaccttcaaccatgcccaaataattttcatctcgccaccttatcaatatgtctctaagcaaatcccgaatattaagtccggccattgtaaaaatctgctccagagcgccctccaccttcagcctcaagcagcgaatcatgattgcaaaaattcaggttcctcacagacctgtataagattcaaaagcggaacattaacaaaaataccgcgatcccgtaggtcccttcgcagggccagctgaacataatcgtgcaggtctgcacggaccagcgcggccacttccccgccaggaaccatgacaaaagaacccacactgattatgacacgcatactcggagctatgctaaccagcgtagcccctatgtaagcttgttgcatgggcggcgatataaaatgcaaggtgctgctcaaaaaatcaggcaaagcctcgcgcaaaaaagcaagcacatcgtagtcatgctcatgcagataaaggcaggtaagttccggaaccaccacagaaaaagacaccatttttctctcaaacatgtctgcgggttcctgcattaaacacaaaataaaataacaaaaaaaaacatttaaacattagaagcctgtcttacaacaggaaaaacaacccttataagcataagacggactacggccatgccggcgtgaccgtaaaaaaactggtcaccgtgattaaaaagcaccaccgacagttcctcggtcatgtccggagtcataatgtaagactcggtaaacacatcaggttggttaacatcggtcagtgctaaaaagcgaccgaaatagcccgggggaatacatacccgcaggcgtagagacaacattacagcccccataggaggtataacaaaattaataggagagaaaaacacataaacacctgaaaaaccctcctgcctaggcaaaatagcaccctcccgctccagaacaacatacagcgcttccacagcggcagccataacagtcagccttaccagtaaaaaaacctattaaaaaacaccactcgacacggcaccagctcaatcagtcacagtgtaaaaagggccaagtacagagcgagtatatataggactaaaaaatgacgtaacggttaaagtccacaaaaaacacccagaaaaccgcacgcgaacctacgcccagaaacgaaagccaaaaaacccacaacttcctcaaatcttcacttccgttttcccacgatacgtcacttcccattttaaaaaaactacaattcccaatacatgcaagttactccgccctaaaacggcctatgtggccgcgcgccgatatcgttaacgccccgcgccggccgctctagaactagtggatcccccggaagatcagaagttcctattccgaagttcctattctctagaaagtataggaacttctgatctgcgcagccgccatgccggggttttacgagattgtgattaaggtccccagcgaccttgacgagcatctgcccggcatttctgacagctttgtgaactgggtggccgagaaggaatgggagttgccgccagattctgacatggatctgaatctgattgagcaggcacccctgaccgtggccgagaagctgcagcgcgactttctgacggaatggcgccgtgtgagtaaggctccggaggcccttttctttgtgcaatttgagaagggagagagctacttccacatgcacgtgctcgtggaaaccaccggggtgaaatccatggttttgggacgtttcctgagtcagattcgcgaaaaactgattcagagaatttaccgcgggatcgagccgactttgccaaactggttcgcggtcacaaagaccagaaatggcgccggaggcgggaacaaggtggtggatgagtgctacatccccaattacttgctccccaaaacccagcctgagctccagtgggcgtggactaatatggaacagtatttaagcgcctgtttgaatctcacggagcgtaaacggttggtggcgcagcatctgacgcacgtgtcgcagacgcaggagcagaacaaagagaatcagaatcccaattctgatgcgccggtgatcagatcaaaaacttcagccaggtacatggagctggtcgggtggctcgtggacaaggggattacctcggagaagcagtggatccaggaggaccaggcctcatacatctccttcaatgcggcctccaactcgcggtcccaaatcaaggctgccttggacaatgcgggaaagattatgagcctgactaaaaccgcccccgactacctggtgggccagcagcccgtggaggacatttccagcaatcggatttataaaattttggaactaaacgggtacgatccccaatatgcggcttccgtctttctgggatgggccacgaaaaagttcggcaagaggaacaccatctggctgtttgggcctgcaactaccgggaagaccaacatcgcggaggccatagcccacactgtgcccttctacgggtgcgtaaactggaccaatgagaactttcccttcaacgactgtgtcgacaagatggtgatctggtgggaggaggggaagatgaccgccaaggtcgtggagtcggccaaagccattctcggaggaagcaaggtgcgcgtggaccagaaatgcaagtcctcggcccagatagacccgactcccgtgatcgtcacctccaacaccaacatgtgcgccgtgattgacgggaactcaacgaccttcgaacaccagcagccgttgcaagaccggatgttcaaatttgaactcacccgccgtctggatcatgactttgggaaggtcaccaagcaggaagtcaaagactttttccggtgggcaaaggatcacgtggttgaggtggagcatgaattctacgtcaaaaagggtggagccaagaaaagacccgcccccagtgacgcagatataagtgagcccaaacgggtgcgcgagtcagttgcgcagccatcgacgtcagacgcggaagcttcgatcaactacgcagacaggtaccaaaacaaatgttctcgtcacgtgggcatgaatctgatgctgtttccctgcagacaatgcgagagaatgaatcagaattcaaatatctgcttcactcacggacagaaagactgtttagagtgctttcccgtgtcagaatctcaacccgtttctgtcgtcaaaaaggcgtatcagaaactgtgctacattcatcatatcatgggaaaggtgccagacgcttgcactgcctgcgatctggtcaatgtggatttggatgactgcatctttgaacaataaatgatttaaatcaggtggcctctatggccatggctgccgatggttatcttccagattggctcgaggacactctctctgaaggaataagacagtggtggaagctcaaacctggcccaccaccaccaaagcccgcagagcggcataaggacgacagcaggggtcttgtgcttcctgggtacaagtacctcggacccttcaacggactcgacaagggagagccggtcaacgaggcagacgccgcggccctcgagcacgacaaagcctacgaccggcagctcgacagcggagacaacccgtacctcaagtacaaccacgccgacgcggagtttcaggagcgccttaaagaagatacgtcttttgggggcaacctcggacgagcagtcttccaggcgaaaaagagggttcttgaacctctgggcctggttgaggaacctgttaagacggctccgggaaaaaagaggccggtagagcactctcctgtggagccagactcctcctcgggaaccggaaaggcgggccagcagcctgcaagaaaaagattgaattttggtcagactggagacgcagactcagtacctgacccccagcctctcggacagccaccagcagccccctctggtctgggaactaatacgatggctacaggcagtggcgcaccaatggcagacaataacgagggcgccgacggagtgggtaattcctcgggaaattggcattgcgattccacatggatgggcgacagagtcatcaccaccagcacccgaacctgggccctgcccacctacaacaaccacctctacaaacaaatttccagccaatcaggagcctcgaacgacaatcactactttggctacagcaccccttgggggtattttgacttcaacagattccactgccacttttcaccacgtgactggcaaagactcatcaacaacaactggggattccgacccaagagactcaacttcaagctctttaacattcaagtcaaagaggtcacgcagaatgacggtacgacgacgattgccaataaccttaccagcacggttcaggtgtttactgactcggagtaccagctcccgtacgtcctcggctcggcgcatcaaggatgcctcccgccgttcccagcagacgtcttcatggtgccacagtatggatacctcaccctgaacaacgggagtcaggcagtaggacgctcttcattttactgcctggagtactttccttctcagatgctgcgtaccggaaacaactttaccttcagctacacttttgaggacgttcctttccacagcagctacgctcacagccagagtctggaccgtctcatgaatcctctcatcgaccagtacctgtattacttgagcagaacaaacactccaagtggaaccaccacgcagtcaaggcttcagttttctcaggccggagcgagtgacattcgggaccagtctaggaactggcttcctggaccctgttaccgccagcagcgagtatcaaagacatctgcggataacaacaacagtgaatactcgtggactggagctaccaagtaccacctcaatggcagagactctctggtgaatccgggcccggccatggcaagccacaaggacgatgaagaaaagttttttcctcagagcggggttctcatctttgggaagcaaggctcagagaaaacaaatgtggacattgaaaaggtcatgattacagacgaagaggaaatcaggacaaccaatcccgtggctacggagcagtatggttctgtatctaccaacctccagagaggcaacagacaagcagctaccgcagatgtcaacacacaaggcgttcttccaggcatggtctggcaggacagagatgtgtaccttcaggggcccatctgggcaaagattccacacacggacggacattttcacccctctcccctcatgggtggattcggacttaaacaccctcctccacagattctcatcaagaacaccccggtacctgcgaatccttcgaccaccttcagtgcggcaaagtttgcttccttcatcacacagtactccacgggacaggtcagcgtggagatcgagtgggagctgcagaaggaaaacagcaaacgctggaatcccgaaattcagtacacttccaactacaacaagtctgttaatgtggactttactgtggacactaatggcgtgtattcagagcctcgccccattggcaccagatacctgactcgtaatctgttgcttgttaatcaataaaccgtttaattcgtttcagttgaactttggtctctgcgtatttctttcttatctagtttccatggctacgtagataagtagcatggcgggttaatcattaactacagcccgggcgtttaaacagcgggcggaggggtggagtcgtgacgtgaattacgtcatagggttagggaggtcctgtattagaggtcacgtgagtgttttgcgacattttgcgacaccatgtggtctcgctgggggggggggcccgagtgagcacgcagggtctccattttgaagcgggaggtttgaacgcggccgcaaaaggccttcttggccaccccgggccgtcgaccaattctcatgtttgacagcttatcatcgaatttctgccattcatccgcttattatcacttattcaggcgtagcaaccaggcgtttaagggcaccaataactgccttaaaaaaattacgccccgccctgccactcatcgcagtactgttgtaattcattaagcattctgccgacatggaagccatcacaaacggcatgatgaacctgaatcgccagcggcatcagcaccttgtcgccttgcgtataatatttgcccatggtgaaaacgggggcgaagaagttgtccatattggccacgtttaaatcaaaactggtgaaactcacccagggattggctgagacgaaaaacatattctcaataaaccctttagggaaataggccaggttttcaccgtaacacgccacatcttgcgaatatatgtgtagaaactgccggaaatcgtcgtggtattcactccagagcgatgaaaacgtttcagtttgctcatggaaaacggtgtaacaagggtgaacactatcccatatcaccagctcaccgtctttcattgccatacggaattccggatgagcattcatcaggcgggcaagaatgtgaataaaggccggataaaacttgtgcttatttttctttacggtctttaaaaaggccgtaatatccagctgaacggtctggttataggtacattgagcaactgactgaaatgcctcaaaatgttctttacgatgccattgggatatatcaacggtggtatatccagtgatttttttctccattttagcttccttagctcctgaaaatctcgataactcaaaaaatacgcccggtagtgatcttatttcattatggtgaaagttggaacctcttacgtgccgatcaacgtctcattttcgccaaaagttggcccagggcttcccggtatcaacagggacaccaggatttatttattctgcgaagtgatcttccgtcacaggtatttattcgcgataagctcatggagcggcgtaaccgtcgcacaggaaggacagagaaagcgcggatctgggaagtgacggacagaacggtcaggacctggattggggaggcggttgccgccgctgctgctgacggtgtgacgttctctgttccggtcacaccacatacgttccgccattcctatgcgatgcacatgctgtatgccggtataccgctgaaagttctgcaaagcctgatgggacataagtccatcagttcaacggaagtctacacgaaggtttttgcgctggatgtggctgcccggcaccgggtgcagtttgcgatgccggagtctgatgcggttgcgatgctgaaacaattatcctgagaataaatgccttggcctttatatggaaatgtggaactgagtggatatgctgtttttgtctgttaaacagagaagctggctgttatccactgagaagcgaacgaaacagtcgggaaaatctcccattatcgtagagatccgcattattaatctcaggagcctgtgtagcgtttataggaagtagtgttctgtcatgatgcctgcaagcggtaacgaaaacgatttgaatatgccttcaggaacaatagaaatcttcgtgcggtgttacgttgaagtggagcggattatgtcagcaatggacagaacaacctaatgaacacagaaccatgatgtggtctgtccttttacagccagtagtgctcgccgcagtcgagcgacagggcgaagccctcgagtgagcgaggaagcaccagggaacagcacttatatattctgcttacacacgatgcctgaaaaaacttcccttggggttatccacttatccacggggatatttttataattattttttttatagtttttagatcttcttttttagagcgccttgtaggcctttatccatgctggttctagagaaggtgttgtgacaaattgccctttcagtgtgacaaatcaccctcaaatgacagtcctgtctgtgacaaattgcccttaaccctgtgacaaattgccctcagaagaagctgttttttcacaaagttatccctgcttattgactcttttttatttagtgtgacaatctaaaaacttgtcacacttcacatggatctgtcatggcggaaacagcggttatcaatcacaagaaacgtaaaaatagcccgcgaatcgtccagtcaaacgacctcactgaggcggcatatagtctctcccgggatcaaaaacgtatgctgtatctgttcgttgaccagatcagaaaatctgatggcaccctacaggaacatgacggtatctgcgagatccatgttgctaaatatgctgaaatattcggattgacctctgcggaagccagtaaggatatacggcaggcattgaagagtttcgcggggaaggaagtggttttttatcgccctgaagaggatgccggcgatgaaaaaggctatgaatcttttccttggtttatcaaacgtgcgcacagtccatccagagggctttacagtgtacatatcaacccatatctcattcccttctttatcgggttacagaaccggtttacgcagtttcggcttagtgaaacaaaagaaatcaccaatccgtatgccatgcgtttatacgaatccctgtgtcagtatcgtaagccggatggctcaggcatcgtctctctgaaaatcgactggatcatagagcgttaccagctgcctcaaagttaccagcgtatgcctgacttccgccgccgcttcctgcaggtctgtgttaatgagatcaacagcagaactccaatgcgcctctcatacattgagaaaaagaaaggccgccagacgactcatatcgtattttccttccgcgatatcacttccatgacgacaggatagtctgagggttatctgtcacagatttgagggtggttcgtcacatttgttctgacctactgagggtaatttgtcacagttttgctgtttccttcagcctgcatggattttctcatactttttgaactgtaatttttaaggaagccaaatttgagggcagtttgtcacagttgatttccttctctttcccttcgtcatgtgacctgatacgcgtgctaccttaagagagtcaattcgcccttcccggtcgatatgaacagcttatttacataattcacgttattggtagttataaatgaaattcctaatatcggttatgaagtgaaattgaatttctacttgatctttctctctatttttgtaaaataaaattaagaatatttaaatattcaatgattcatttttgcagaaatcggaggaagaagaatatatgaaaacatttaacatttctcaacaagatccccccatattgttgtataagtgatgaaatactgaatttaaaacttagtttatatgtggtaaaatgttttaatcaagtttaggaggaattaattatgaagtgtaatgaataatgaatgtaacagggttcaattaaaagagggaagcgtatcattaaccctataaactacgtctgccctcattattggagggtgaaatgtgaatacatcctattcacaatcgaatttacgacacaaccaaattttaatttggctttgcattttatctttttttagcgtattaaatgaaatggttttgaacgtctcattacctgatattgcaaatgattttaataaaccaccagcgagtacaaactgggtgaacacagcctttatgttaaccttttccattggaacagctgtatatggaaagctatctgatcaattaggcatcaaaaggttactcctatttggaattataataaattgtttcgggtcggtaattgggtttgttggccattctttcttttccttacttattatggctcgttttattcaaggggctggtgcagctgcatttccagcactcgtaatggttgtagttgcgcgctatattccaaaggaaaataggggtaaagcatttggtcttattggatcgatagtagccatgggagaaggagtcggtccagcgattggtggaatgatagcccattatattcattggtcctatcttctactcattcctatgataacaattatcactgttccgtttcttatgaaattattaaagaaagaagtaaggataaaaggtcattttgatatcaaaggaattatactaatgtctgtaggcattgtattttttatgttgtttacaacatcatatagcatttcttttcttatcgttagcgtgctgtcattcctgatatttgtaaaacatatcaggaaagtaacagatccttttgttgatcccggattagggaaaaatataccttttatgattggagttctttgtgggggaattatatttggaacagtagcagggtttgtctctatggttccttatatgatgaaagatgttcaccagctaagtactgccgaaatcggaagtgtaattattttccctggaacaatgagtgtcattattttcggctacattggtgggatacttgttgatagaagaggtcctttatacgtgttaaacatcggagttacatttctttctgttagctttttaactgcttcctttcttttagaaacaacatcatggttcatgacaattataatcgtatttgttttaggtgggctttcgttcaccaaaacagttatatcaacaattgtttcaagtagcttgaaacagcaggaagctggtgctggaatgagtttgcttaactttaccagctttttatcagagggaacaggtattgcaattgtaggtggtttattatccatacccttacttgatcaaaggttgttacctatggaagttgatcagtcaacttatctgtatagtaatttgttattacttttttcaggaatcattgtcattagttggctggttaccttgaatgtatataaacattctcaaagggatttctaaatcgttaagggatcaactttgggagagagttcaaaattgatcctttttttataacaggaattgggcatcaaataaaacgaaaggctcagtcgaaagactgggcctttcgttttatctgttgtttgtcggtgaacgctctcctgagtaggacaaatccgccgggagcggatttgaacgttgcgaagcaacggcccggagggtggcgggcaggacgcccgccataaactgccaggcatcaaattaagcagaaggccatcctgacggatggcctttttgcgtttctacaaactcttcctgtcgtcatatctacaattctacacagcccagtccagactattcggcactgaaattatgggtgaagtggtcaagacctcactaggcaccttaaaaatagcgcaccctgaagaagatttatttgaggtagcccttgcctacctagcttccaagaaagatatcctaacagcacaagagcggaaagatgttttgttctacatccagaacaacctctgctaaaattcctgaaaaattttgcaaaaagttgttgactttatctacaaggtgtggcataatgtgtggaattgtgagcggataacaattaagctaattctatggtaaaagcattcctgaacccaatatccttatttttagtggacaaggccttgttctcatatggttgcttgagccagtgccttacaaggctcttccgctttggcaggctgttcaaaattatttattagagcaactcaaggaactaggcggagatccaaaagcaaccgatgcagcacgtgtttttcggattgctgggagcgtcaatagtaagaatggagcggaagtaagagcggaatatcggcacgattacagatatgagttaaggcagattcaatttgattaccttccagaactcaatgaggttattaatcccgctccacaaaagaaaaaacgggggcgtaaaaagaaagtagttcagttattcaatacctacaaactccattacgctcgcctattggatatagtgaaattggtggaactacgaaattatgaggtaactggatacagggaaatcatttgctttttataccgttattggttgtgctgttacacgaacgaccctgtagaggctttaaatcaaacacagacacttaatttacagttcactgagcctttacccttaaaagaggttgaaagggctacacggagcgcagaaaaggcgtgggaagcacgaaataacgaagaggctaaccggattgcaatcgaaaaaggatatcccagtgctggatacaatattagcaataaaaagttgattgaatggctagatatcacaccagaagaacagaagcatttacagacgattatagacgctaatgagaaacggagaagaaagcgggaaagggataggatttatcaagaacaaaaacgtcgtgagcggggagatatgacccgacaggagtatattaagcaacaacaggataaaacagatgataaattatttaaattgcaggagttattagaacagaatcccaaaatctcaaaaattaaattagcaaaaatacttggtgtagataaatcgcacttatacagactgctgaaacaactataactggaaaaaattagtgtctcatggttcgtcgcccttatattatgggcgttagcctgcttgctaattggataggtgttattgtcatttcaacgtcggacgttttggtagatgaacgtcggacgttatttgcttcaatagattgttgatgtattaagggttgcagtgaatcgacaagcaaaaagttatgacgttgtgaaaaaattgaatagaaaattggaaattacgtcggacgttctaacttaaaaaccctgttatatcaatgatttaaaaggaaattaacgtcataaaagacctttctgcaacaaaagtttttctggaagagttgaggttattttataggtattatggacttttgtagactttttgtgtactttttgtggactccacactcgctggtatcgtgttattttttaattgagatatgaatatggaaattaaacgttttaggcgttggtttggtgatgacaaaaaaataagagtacccgctcacaacggatactctttcgagaaatgtacgaaacgctataaataaaaaataactagatacatttacattgtatcacgtttcgtacatttctccaataacaaattgattggaggaatgcaaagtgaataatgaaccagtaaaacgtggtaagaagaacagatgggaattaaacctacctataatgacttatgtagtagctgatgattggattgataaactaggacacgaaacgtttactttatggttgaggttccatacttgggtagatagagaagatgaactccgagattatgatcgcatacctagaagttttgagaacatatataaaaagacactaggaatctcaaaaagtaagttttatagattgataaaacctttatgggaatatggattaatagacatcatagaatacgaagaatctaaccgtaattctactaaacctaaaaatataattgtttatgagtatcctttacacgaaatagaaagaaagtataaaccactagaaaaattaagagattgggataaagactataattccgtttctaaagaattaggtaaaacaggtggtagaccaaggaaaaaagatagtgaagaagaacccgaaaagaaacccgaagaagtaactaaaaagaaacgtaaatataagttaaaaagagttatccacaacggtttcaaaaatgaaacggtggagggtttcaaaaatgaaacggtggagggtttcaaaaatgaaacggtgaccgtttcaaaaataaaacccaataattattcaaatatctttaataacttatcaaatatttctactaatgtttcaaataatttattaattgatgatgatgaggaaatcgaaaatgaaccaactggtcgtacaataaataggtcattacttttttcacaagaagatattaaacaggcctatcaatttattaatagattttcagttatacagttacgtgaaaactttagctttgataaacactttgaagaacggttggtatgttatttatggaaagcagggatttctactttttacacgcacgaaatcagtaaaatgataaaaaaaatagcagactatgaaaaatctaaaaaaggtagattaaacccaatacgtgaccgagccttatatatggtaaatggtcttgtaatgaatagagcttcttcccaaagtgaacatgctacttataaactaaaccaatataaaaaacagaaggaacaggaaaaacaacaacaggagcaacaaagatcaagagtaccgttctataattggttggaggaaagagaagaacaaaccgaaggtcaactacccaccacttaaagcctaacggcttttgaagtggggcttgtaaaaagccctagttgactaccccaagtctttcgaggactacgttggaaaggtcatgacacctacaaatgctcctctagttcgtagccactgtcgttgatggttaaaagtcctgatgggtagggacggtgctgtcaacatcacaagcccttccaacatgggggaagaggaagaacactccgagaaaggagggggctgtcgtacacgccttgttcgtgtacgtgatttttaacacttttatctctaatataatctctccttgagttagcagagactaagaataaaacacattaggattttttatctacataaggaggttcaatacatgcctactatttcgtttaagggaaagtcttttgtacaaaatcatcacttgactgtaaaatatcatgaattgatcccagaaccagaaaaaagtctgaccgataaagttagtcttcatgacaatcttatcattcatggggacaatttaaaggcgttgaaagctctactacctacatatgctggtaagatagattgcatctatattgacccaccatacaatactggaactgaaaaatggatttataatgataatgtcaactccccaatgattagggaatggcttggaaaagtggtagacaaagaagacttatcccgacatgataagtggctttgtatgatgatgccgaggttaaaactgttgaaagagttgttgtcagaagacggagtgatatttgtaagcattgactacaatgaaatacaccatcttacgtgccttatgaacgaaatattcggtgaggagaattttcgtgacgctattatcattcgtagaggagtaaaaaatgttcaagcgcaatttgacacaattgattctctttcaaatggttatgagtctattttggtttacactaaacagccatctcgacgatttaataaggtttatgaagatgtagaagaaaagcctggtagttggaataatcattggagaggtacagaccgtaaaactatgagatatgaattatttggggttactccgacagaaggtcaatggagatgggggaaagaacgtagtctccaggctattgaaaactatcaaatgatgttagatgaacttagacaaaaaggcattactaatccaactcaagaggatattgataaatggtatcttgaatatgtagaaaataatggggaagatattgacttgttacgacaaaatgataatggcacgattgagcactttgttccaccgactagcaaaaagttgttaagtaatgcctggtttgacttaaaacccaacggttctagtcaattaaagaagatatttggaaggaaggttttcgataaccctaaatcaattgatttggtaaaaagactaatacaatttgcgactgaaaacaaagaagcgattgtacttgactcatttgcagggagtggcactactgctcatgcagtattatcgcttaacaaacaagatggagggaatcgtcgtttcatccttattgagatggaagaatatgcacatgagattaccgcagaacgcggatctttatcgatttgcatgcaagctaattcggtggaaacgaggtcatcatttccttccgaaaaaacggttgcatttaaatcttacatatgtaatactttcaaagactacatttgtaagatttgatgtttgagtcggctgaaagatcgtacgtaccaattattgtttcgtgattgttcaagccataacactgtagggatagtggaaagagtgcttcatctggttacgatcaatcaaatattcaaacggagggagacgattttgatgaaaccagtaacgttatacgatgtcgcagagtatgccggtgtctcttatcagaccgtttcccgcgtggtgaaccaggccagccacgtttctgcgaaaacgcgggaaaaagtggaagcggcgatggcggagctgaattacattcccaaccgcgtggcacaacaactggcgggcaaacagtcgttgctgattggcgttgccacctccagtctggccctgcacgcgccgtcgcaaattgtcgcggcgattaaatctcgcgccgatcaactgggtgccagcgtggtggtgtcgatggtagaacgaagcggcgtcgaagcctgtaaaacggcggtgcacaatcttctcgcgcaacgcgtcagtgggctgatcattaactatccgctggatgaccaggatgccattgctgtggaagctgcctgcactaatgttccggcgttatttcttgatgtctctgaccagacacccatcaacagtattattttctcccatgaagacggtacgcgactgggcgtggagcatctggtcgcattgggtcaccagcaaatcgcgctgttagcgggcccattaagttctgtctcggcgcgtctgcgtctggctggctggcataaatatctcactcgcaatcaaattcagccgatagcggaacgggaaggcgactggagtgccatgtccggttttcaacaaaccatgcaaatgctgaatgagggcatcgttcccactgcgatgctggttgccaacgatcagatggcgctgggcgcaatgcgcgccattaccgagtccgggctgcgcgttggtgcggatatctcggtagtgggatacgacgataccgaagacagctcatgttatatcccgccgttaaccaccatcaaacaggattttcgcctgctggggcaaaccagcgtggaccgcttgctgcaactctctcagggccaggcggtgaagggcaatcagctgttgcccgtctcactggtgaaaagaaaaaccaccctggcgcccaatacgcaaaccgcctctccccgcgcgttggccgattcattaatgcagctggcacgacaggtttcccgactggaaagcgggcagtgagcgcaacgcaattaatgtgagttaggatcgctaccttaagagagacgcgttatcgggggttagttcgtcatcattgatgagggttgattatcacagtttattactctgaattggctatccgcgtgtgtacctctacctggagtttttcccacggtggatatttcttcttgcgctgagcgtaagagctatctgacagaacagttcttctttgcttcctcgccagttcgctcgctatgctcggttacacggctgcggcgagcgctagtgataataagtgactgaggtatgtgctcttcttatctccttttgtagtgttgctcttattttaaacaactttgcggttttttgatgactttgcgattttgttgttgctttgcagtaaattgcaagatttaataaaaaaacgcaaagcaatgattaaaggatgttcagaatgaaactcatggaaacacttaaccagtgcataaacgctggtcatgaaatgacgaaggctatcgccattgcacagtttaatgatgacagcccggaagcgaggaaaataacccggcgctggagaataggtgaagcagcggatttagttggggtttcttctcaggctatcagagatgccgagaaagcagggcgactaccgcacccggatatggaaattcgaggacgggttgagcaacgtgttggttatacaattgaacaaattaatcatatgcgtgatgtgtttggtacgcgattgcgacgtgctgaagacgtatttccaccggtgatcggggttgctgcccataaaggtggcgtttacaaaacctcagtttctgttcatcttgctcaggatctggctctgaaggggctacgtgttttgctcgtggaaggtaacgacccccagggaacagcctcaatgtatcacggatgggtaccagatcttcatattcatgcagaagacactctcctgcctttctatcttggggaaaaggacgatgtcacttatgcaataaagcccacttgctggccggggcttgacattattccttcctgtctggctctgcaccgtattgaaactgagttaatgggcaaatttgatgaaggtaaactgcccaccgatccacacctgatgctccgactggccattgaaactgttgctcatgactatgatgtcatagttattgacagcgcgcctaacctgggtatcggcacgattaatgtcgtatgtgctgctgatgtgctgattgttcccacgcctgctgagttgtttgactacacctccgcactgcagtttttcgatatgcttcgtgatctgctcaagaacgttgatcttaaagggttcgagcctgatgtacgtattttgcttaccaaatacagcaatagtaatggctctcagtccccgtggatggaggagcaaattcgggatgcctggggaagcatggttctaaaaaatgttgtacgtgaaacggatgaagttggtaaaggtcagatccggatgagaactgtttttgaacaggccattgatcaacgctcttcaactggtgcctggagaaatgctctttctatttgggaacctgtctgcaatgaaattttcgatcgtctgattaaaccacgctgggagattagataatgaagcgtgcgcctgttattccaaaacatacgctcaatactcaaccggttgaagatacttcgttatcgacaccagctgccccgatggtggattcgttaattgcgcgcgtaggagtaatggctcgcggtaatgccattactttgcctgtatgtggtcgggatgtgaagtttactcttgaagtgctccggggtgatagtgttgagaagacctctcgggtatggtcaggtaatgaacgtgaccaggagctgcttactgaggacgcactggatgatctcatcccttcttttctactgactggtcaacagacaccggcgttcggtcgaagagtatctggtgtcatagaaattgccgatgggagtcgccgtcgtaaagctgctgcacttaccgaaagtgattatcgtgttctggttggcgagctggatgatgagcagatggctgcattatccagattgggtaacgattatcgcccaacaagtgcttatgaacgtggtcagcgttatgcaagccgattgcagaatgaatttgctggaaatatttctgcgctggctgatgcggaaaatatttcacgtaagattattacccgctgtatcaacaccgccaaattgcctaaatcagttgttgctcttttttctcaccccggtgaactatctgcccggtcaggtgatgcacttcaaaaagcctttacagataaagaggaattacttaagcagcaggcatctaaccttcatgagcagaaaaaagctggggtgatatttgaagctgaagaagttatcactcttttaacttctgtgcttaaaacgtcatctgcatcaagaactagtttaagctcacgacatcagtttgctcctggagcgacagtattgtataagggcgataaaatggtgcttaacctggacaggtctcgtgttccaactgagtgtatagagaaaattgaggccattcttaaggaacttgaaaagccagcaccctgatgcgaccacgttttagtctacgtttatctgtctttacttaatgtcctttgttacaggccagaaagcataactggcctgaatattctctctgggcccactgttccacttgtatcgtcggtctgataatcagactgggaccacggtcccactcgtatcgtcggtctgattattagtctgggaccacggtcccactcgtatcgtcggtctgattattagtctgggaccacggtcccactcgtatcgtcggtctgataatcagactgggaccacggtcccactcgtatcgtcggtctgattattagtctgggaccatggtcccactcgtatcgtcggtctgattattagtctgggaccacggtcccactcgtatcgtcggtctgattattagtctggaaccacggtcccactcgtatcgtcggtctgattattagtctgggaccacggtcccactcgtatcgtcggtctgattattagtctgggaccacgatcccactcgtgttgtcggtctgattatcggtctgggaccacggtcccacttgtattgtcgatcagactatcagcgtgagactacgattccatcaatgcctgtcaagggcaagtattgacatgtcgtcgtaacctgtagaacggagtaacctcggtgtgcggttgtatgcctgctgtggattgctgctgtgtcctgcttatccacaacattttgcgcacggttatgtggacaaaatacctggttacccaggccgtgccggcacgttaaccgggctgcatccgatgcaagtgtgtcgctgtcgacgagctcgcgagctcggacatgaggttgccccgtattcagtgtcgctgatttgtattgtctgaagttgtttttacgttaagttgatgcagatcaattaatacgatacctgcgtcataattgattatttgacgtggtttgatggcctccacgcacgttgtgatatgtagatgataatcattatcactttacgggtcctttccggtgatccgacaggttacggggcggcgacctcgcgggttttcgctatttatgaaaattttccggtttaaggcgtttccgttcttcttcgtcataacttaatgtttttatttaaaataccctctgaaaagaaaggaaacgacaggtgctgaaagcgagctttttggcctctgtcgtttcctttctctgtttttgtccgtggaatgaacaatggaagtccgagctcatcgctaataacttcgtatagcatacattatacgaagttatattcgatgcggccgcaagcttgaagagctcttctttcagaacgctcggttgccgccgggcgttttttatgagacgtctcggcctgtttggccatta

SEQ ID NO: 2 - DNA, 30339 bp, synthetic construct
  misc_feature 1..30339: note = seed plasmid 2
  source 1..30339: mol_type = other DNA
gcggccgcttgcccactccctctctgcgcgctcgctcgctcggtggggcctgcggaccaaaggtccgcagacggcagagctctgctctgccggccccaccgagcgagcgagcgcgcagagagggagtgggcaactccatcactaggggtaaggccttgatggccaattcgattcgattagggcctacttggcctaatagtaatcaattacggggtcattagttcatagcccatatatggagttccgcgttacataacttacggtaaatggcccgcctggctgaccgcccaacgacccccgcccattgacgtcaataatgacgtatgttcccatagtaacgccaatagggactttccattgacgtcaatgggtggagtatttacggtaaactgcccacttggcagtacatcaagtgtatcatatgccaagtacgccccctattgacgtcaatgacggtaaatggcccgcctggcattatgcccagtacatgaccttatgggactttcctacttggcagtacatctacgtattagtcatcgctattaccatggtgatgcggttttggcagtacatcaatgggcgtggatagcggtttgactcacggggatttccaagtctccaccccattgacgtcaatgggagtttgttttggcaccaaaatcaacgggactttccaaaatgtcgtaacaactccgccccattgacgcaaatgggcggtaggcgtgtacggtgggaggtctatataagcagagctggtttagtgaaccgtcagatgccaccatggtgagcaagggcgaggagctgttcaccggggtggtgcccatcctggtcgagctggacggcgacgtaaacggccacaagttcagcgtgtccggcgagggcgagggcgatgccacctacggcaagctgaccctgaagttcatctgcaccaccggcaagctgcccgtgccctggcccaccctcgtgaccaccctgacctacggcgtgcagtgcttcagccgctaccccgaccacatgaagcagcacgacttcttcaagtccgccatgcccgaaggctacgtccaggagcgcaccatcttcttcaaggacgacggcaactacaagacccgcgccgaggtgaagttcgagggcgacaccctggtgaaccgcatcgagctgaagggcatcgacttcaaggaggacggcaacatcctggggcacaagctggagtacaactacaacagccacaacgtctatatcatggccgacaagcagaagaacggcatcaaggtgaacttcaagatccgccacaacatcgaggacggcagcgtgcagctcgccgaccactaccagcagaacacccccatcggcgacggccccgtgctgctgcccgacaaccactacctgagcacccagtccgccctgagcaaagaccccaacgagaagcgcgatcacatggtcctgctggagttcgtgaccgccgccgggatcactctcggcatggacgagctgtacaagtaagggtggcatccctgtgacccctccccagtgcctctcctggccctggaagttgccactccagtgcccaccagccttgtcctaataaaattaagttgcatcattttgtctgactaggtgtccttctataatattatggggtggaggggggtggtatggagcaaggggcaagttgggaagacaacctgtagggcctgcggggtctattgggaaccaagctggagtgcagtggcacaatcttggctcactgcaatctccgcctcctgggttcaagcgattctcctgcctcagcctcccgagttgttgggattccaggcatgcatgaccaggctcagctaatttttgtttttttggtagagacggggtttcaccatattggccaggctggtctccaactcctaatctcaggtgatctacccaccttggcctcccaaattgctgggattacaggcgtgaaccactgctcccttccctgtccttttacccctagtgatggagttgcccactccctctctgcgcgctcgctcgctcggtggggcctgcggaccaaaggtccgcagacggcagagctctgctctgccggccccaccgagcgagcgagcgcgcagagagggagtgggcaaggcctgattggccatatatgtatctggacatccatgtgatgccggcagcggtagttgttgctcgcataaattcgcgggctcggttccaaatattgcgcaggggtaaaaagcgttcaatagttgccacgctttgaccggtcaggcgtgcgcagtcttgaatgctctggacatggaaaaaatgaaagttggtaagcgactcccttccgtggtttggtggaaaagtcacaagggtaccatagcgaggaaccccggttcgaaaccggcaggatccgctatgagcacaagtgaggcgcttgcgcgttgaacccggccaaggacccccagacacggagaggagtctttttttatttattttttcttagatgcatcctgtcctgcgacaaatgcgacctcagcccagggcaaccacggcctcagcagcggtggcgctttcgggctctggcgaacaggaagagcctcaatggggtgcctaattgtatgctacaaagtcctcaggtagtgggcacattgcaacgcaatcagaatgaattgtataaattcttaaacaatctgtccccttactttcgtcacaaccgcgagcgcatagaaaaagctacatcttttactaaaatgcaaaatggactcaaataaacgtgtacacaatgcattaataataaaaccattttattagctcattggagtacaagcttgactgttttattaaaaatcaaatggctcttcgcgacagtcgccgtggttggtgggcagggatatgtttctgtactgcaaacgctgatgccacttgaattctggaataacaagcctagggggggagccgtcaaaattttctccccacagctggcgcacaagttgcagggcgcccataacatcaggagcagaaatcttgaagtcgcaattagggccagcattgccgcgcgcattgcgataaactggatttgcgcactgaaaaaccaacaaacacggatacttaatactggctaacgctccagggtcggttacttcgttgatatcaatgttatccacattgctgaggttaaaaggagtgattttacacagttgacgccccatccgtggcaggccatcttgcttgtttaaacattcgcagcgcactggcataaggagacgtttttgcccatgtcgcatgtgagggtagtcggccagcataaaagcttcaatttgcctaaaagctatttgagccttcattccttcagaataaaacaagccgcaggactttccggagaaagaattattcccgcagccaacatcatgaaaacagcagcgggcatcgtcgtttttaatttgaactacattacgcccccagcggttttgcgccaccttggctttcgaggggttctctttcaacgctcgttgcccactttcgctggttacatccatttccaccaaatgctctttgcgcaccatctccattccatgcaggcatctaagctccccttcgcgctcggtacacttatgctcccacacgcagcaaccggtgggttcccaggaattctgttggacaccggcataagcttgcatatatccttgcaaaaagcgtcccatgagctcctgaaaggttttttgggatgaaaaagtcagctgcaaaccgcgcttttcttcgttgagccatgttgtgcatattttcttgtacacgctgccctgatccggcaaaaaacgaaaggtggcgcgctcgtcgtgatccacatggtacttttccattagcatagccatggcttccatgcctttttcccaagctgaaactaggggctggcttgccggattgcgaacaacaacaacattcttttcattttcgtcgctgttttgagcggaagccttcaaaacgtgtacctgcctggtttccattttttgaaaagactgagaaccgtctgcatgatgcataatgcggacgggcggcatgctgaaacccattactcctaaaactgctcttggtggttctgcctcttcttcttctgcactctctggggaaagaggtatcgcagccatagatttcttgacttttttctttggaggtaaaggcacagcttccagttcttcttcgctttcggaatccagaaagtatctgcccatttttggcggcggcggctgagcgctgcggtctggggtgcgctccctctgtgagtgctgattgctggccattatttaatcctaggcaaagaaacacatgatggatctggagccacaggaaagcttaaccgcccccaccgctcccgccattggcgctacggctgtcatggagaaggacaaaagtctactcataccccaagacgcaccggttgagcagaacttgggctacgagactccccccgaggaatttgaaggctttcttcaaatccaaaagcaaccaaatgagcaaaacgctgggctcgaggaccatgactacctaaacgagggagatgtcctgtttaaacatctacagcgacaaagcactatcgttcgcgacgccatatctgatcgctcttcaataccagtttcaattgcagaactatcttgcatctacgaacgcaacctgttctccccacgtgtgccccctaaacggcaagccaacggcacatgcgagccaaatcctcgccttaacttctacccagtttttgcagtgccagaagcactggcaacataccatattttctttaaaaatcacaaaatacccctatcctgtcgagctaaccgcagccgcgcagatgagcttcttgctttaagggctggcgcttccatacctgggattgtgtccttggaagaggtgcctaaaatttttgaaggtttaggtcgggatgaaaaacgagcagcaaatgccctgcaaaaagaaaatgaacaaaatcaccatgggaatagtgctctaatagaactggaaggtgacaatgcccgcctggcagttttaaagcgcaatattgaggttactcactttgcctacccggcagtaaatcttccgccaaaggtaatgagcgcagtgatgaatcagctactaattaagcgagcccaacccattgacaaagatgcaaacttgcaagacccggaggcaacagatgatggaaagccggttgtaagcgacgagcaattaactaagtggttgggaacagacaattccaacgaactacaacagcggcgtaaactcatgatggccgccgtacttgtaactgtggaactcgagtgcatgcatcgttttttctccgacatcaccacattgcgcaaaattgaggaatgtcttcactacactttccgccatggctacgtgcgccaagcctgtaaaatttctaatgtggagctgagcaatctagtttcttacatgggcatcttgcatgaaaaccgattgggacagaacgtgctacactcaacactacgcgatgaagcacgcagagattacgtgcgagactgcatttaccttttcctgttacatacctggcaaactgggatgggtgtttggcagcaatgcttggaagaaaaaaaccttcgagaactaaacaaactgttagacagagcactaaaatccctatggaccggttttgacgaacggacagtagctgcagagctagctgacataattttcccagaaaggttaatgataaccttgcaaaacggcttgcctgactttatgagtcaaagtatgctgcacaattatcgctcttttatattagagcgttctgggatgcttcctagcatgtgttgtgcacttccttcagattttgtgcctatatattttagagagtgcccccctcccctgtggagccactgctacttactacgacttgctaactacctagcttaccactcagaccttatgacagattcaagcggcgaaggcctaatggagtgtcactgccgctgcaatctttgcaccccccaccgttctttggtttgcaatactgaactattaagtgaaagtcaagtcattggtaccttcgaaatgcagggaccgcagtctgacagcaatttcacgacgaacctaagacttacccctgggctttggacttctgcctacctgcgcaaatttgaaccccaagattaccacgcccacagtatcaatttttacgaagaccaatccaaacccccaaaagcgccactaacggcttgcgtcattacgcagggaaaaattctagcccaattgcatgctattaagcaagcgcgcgaagagtttttacttaaaaaaggacacggagtgtaccttgatccccaaaccggcgaggaactaaaccttccatcacctttgtgtgctactgcgtctccccattcgcagcatgtccccgaaagccgcaaaacaggctattgcgcagcaacgctcaaagaaacagcagcaacggcaggaaatctgggaggaagaatcttgggagagtcaggcagaggacgaggtcgaggacttggaagaatgggaggaggaggaggcggacagcctagacgaggatccagaggaggaggaggaaggttccaaggacggagcgaccgccgccaaaccgtcgctttcaaccaagccctctccaatgaaacccgctgtgagcaaatctcagaaagccaaccgtagatgggacaccattgaaaccagcgccgcaaacttgggtaagaatcgcaagcaggcgcgtcggggctactgctcatggcgggctcaccaaagtaatattgtagcctgctttcagcactgcggggggaatatctcatttgcaaggcggtatttgctataccatgatggagtggcgattccaaggaatgtcctccattactaccgtcatctctacagcccctttgaagagctcgacaaggaaccgacctgcaacagccaagcggcccactagaatcggcaacagcagcaacaaggaaagtcctgaggcgcgcgagttaagaaaacgcatttttcccactttatatgctatttttcagcagagtcgaggtcaagaacacgaactgaaaataaaaaaccgttccctgcgttcacttacccgcagctgtctctacctcaaaagcgaagatcagttgcaacgcaccttgcaggacgcagaagctctgttcaataaatactgctccctctcgcttaaagagtaaaaaaagcccgcgcgcggactttcaacaggcgggaaaagtgacgtcacaacaagatgagtaaagatattcccacgccttacatgtggagctttcaaccccaaatgggactggcggccggcgcggctcaagactattctagcaaaatgaattggttaagcgccggaccccacatgatttccagggtgaatggggtacgagcccggcgtaaccaaatactgctagaacaagccgctctcaccgctacaccacgtaatcaacttaaccctccctcttggccagctgccctgatatatcaggaaaatccccctcctaccactgtacttttgcctcgcgacgcccaggccgaagtccatatgactaacgctggggcacagcttgcgggcggtgcacgtcacagtttcaggtataaaggtcgcactgagccctatccgtctaatgaaagttgcatttaatggcattacgtcgctaaatggatactctttaacattcatgtggtcaggtctatcaaactatataaatcagcctttctctacaccatcctgctccttttcttacattacccaagaataaaaacacacacaaaacacaaattgcgtacttattgtttatttttttttttttttacactatacgcgtggttaaactgcctccttcccattttaccttgtatacctccctttccccctttgtagctgaaaacaactgcacttgaatatttcgacttaggttttttggcgttagcgtccacacagtttctttacgggcaaagcgagggtcggtgatggaaacgaatccctcgcccgcacagtcactcaagcggcattccccatccaaaaccaggtccatgattttatcctacaaaaagtaacaacagtcagtgtccatcagccgcccaaggattctctcgttgattataatctccaaataaaattgctcgatgatgcataattaaaccctttagcagttgctgacgataacgttcatgccgactatgttttagagggcgaacagtgttttcagcaattacttgaacaacttttaacattagcagtctggtacgacgagcgcaacagcgcatgcgtatctcacttaagtctttacaataatcacaacacagcactaacatgttatttaaaattccataattaaaggcgctccatccaaaactaactttttctaacgctaaccaggcatggccatcatacataattttaaagtaaattaaatggcgacctctaacaaaggtgcttcccacatacatcacctctttaggcattaaatggttaacaacctcccgataccaaaaacaccttttgttaattaaggcgccatatacggccattttgaaccagcgtcccaaaagcatcccagctgacatacactgtagtgaacccggacgctggcaatgacaatgaataagccaccgctcatgaccatgtaataattgagtaacttcaacatttatagtggcacaacacatacatacactcatgtattttttcaaaataaacatctcataatcagttagaatcatatcccacggtattggccattcctgcagcactgtaaaacctacacatgaaggaatgcctcttacctcacttacattatgtaaagtcagactattacactcaggccataaagaattttccgaagtactcaacgtagcttttgactgttcctcacagggcggtagttggtacttgttgtatggtgccaatctgtagcgataccgtctgtcgcgctgcatcgtaaacaacagacttgcgagcgtcttcgtacttaaaaaaacaaaaccacgtacgaccactggttatcgcacctcgtcctttttgtttgcagcgttggcgttccgtcaaaaaagcaaagtacaaccactctcgcaggcttgctaaaatgtattcagcttcaggtgttatcttcaaatcatgatgtttaataaagcgcagagtatccacacaggatgcatgggctaaaccaagccatgctatgcaggcagccgtgtcccgacttacaggaggaggaggaatacaaggtagaggcataaaaacttaatcaagacggtcagcaaggatttgaatgcgtaaatctcgcaggtggcagcgatcgcctccgctgtgctggtgaaagatcacagccagatcaaattgtaagcgattttccaaatgttcaacaacagcttctaaaagagccacagctctgatttcgataaacaaaagcaaagcaaatgcattatcatgaaactcttctatcatcaaactgcctgactgaaccattcccaggtaattttcattcttccactgttgtattatttgaacacactgattttgcaggtttaaaccgtgaatattaaaaagctctgtaagggcgccctccaccgccatccgcaggcagtacttcatatttgctgaaaaaagtctggatcttcaaacacctgcagtaaattcagtagatttacattaggctccacaccttggtctcgcagctgacatcttaatgccagttgtataaaatcatacaaatcagaagccagcagcaaagaaagttcacctccaggtacaagttccggagttcccacagaacatacaacttgcacaaatggacccatattagtaagcgtggcgccaacgtagacatcgcgcataggaggagttaaataatgcattaccagcagccaaaactcaggtagcacgtctttaagaaacgtcaccacctcaaaatctaagccatgcaaatagttccgtaaagactccggaaacaacacggagtaatgaacaagcgacctctgaaacatgctttaggttagcctgaaaaataaaaatatgttaaattaaagatgcctggcaaacgggtggaaaaacaactctacttaaaagcaagcgcgcgactggctgctttgcgcgaacatcgcaaaacacgtcggaatgattaaacaacaaaacactgagctccattcttgagcctggataaagcgtttcagcgccaacaaaaacccctctggcgttcatgtcgcataatgaaaacaatgttcccaaatatccaggaggaatatcaactgctatgtgcaaatataaaagcacaactccatgtggaggtataacaaaattcgcaggagaaaataacacataagcattagagtcgccctcttgtttaggcaacatagccccaggtcccgtaaaatacacataaagagtctcaaaagcagccataatgccttaccagaaaaacagtacaaagccaggcacagcagacacaatctgccgcaagtgcgcacctttaatactgaaaaatagtgacgtaaatggccaaagttcgcctacacaacacaaaaaaaaccccaaaagcccgcgaaaaaaatcacttccgcatatgactcggcataatacggtgttctcacgacggcctatgtggcctcgcgaagcgcctcccacgctgccgcgtcagcgctgacgtaaattacgtcataggggagtggtcctgtattagctgtcacgtgagtgcttttgcgacattttgcgacaccacgtggccatttagggtatatatggccgagtgagcgagcaggatctccattttgaccgcgaaatttgaacgagcagcagccatgccgggcttctacgagatcgtgatcaaggtgccgagcgacctggacgagcacctgccgggcatttctgactcgtttgtgagctgggtggccgagaaggaatgggagctgcccccggattctgacatggatctgaatctgattgagcaggcacccctgaccgtggccgagaagctgcagcgcgacttcctggtccaatggcgccgcgtgagtaaggctccggaggccctcttctttgttcagttcgagaagggcgagtcctacttccacctccatattctggtggagaccacgggggtcaaatccatggtgctgggccgcttcctgagtcagattagggacaagctggtgcagaccatctaccgcgggatcgagccgaccctgcccaactggttcgcggtgaccaagacgcgtaatggcgccggaggggggaacaaggtggtggacgagtgctacatccccaactacctcctgcccaagactcagcccgagctgcagtgggcgtggactaacatggaggagtatataagcgcctgtttgaacctggccgagcgcaaacggctcgtggcgcagcacctgacccacgtcagccagacccaggagcagaacaaggagaatctgaaccccaattctgacgcgcctgtcatccggtcaaaaacctccgcgcgctacatggagctggtcgggtggctggtggaccggggcatcacctccgagaagcagtggatccaggaggaccaggcctcgtacatctccttcaacgccgcttccaactcgcggtcccagatcaaggccgctctggacaatgccggcaagatcatggcgctgaccaaatccgcgcccgactacctggtaggccccgctccgcccgcggacattaaaaccaaccgcatctaccgcatcctggagctgaacggctacgaacctgcctacgccggctccgtctttctcggctgggcccagaaaaggttcgggaagcgcaacaccatctggctgtttgggccggccaccacgggcaagaccaacatcgcggaagccatcgcccacgccgtgcccttctacggctgcgtcaactggaccaatgagaactttcccttcaatgattgcgtcgacaagatggtgatctggtgggaggagggcaagatgacggccaaggtcgtggagtccgccaaggccattctcggcggcagcaaggtgcgcgtggaccaaaagtgcaagtcgtccgcccagatcgaccccacccccgtgatcgtcacctccaacaccaacatgtgcgccgtgattgacgggaacagcaccaccttcgagcaccagcagccgttgcaggaccggatgttcaaatttgaactcacccgccgtctggagcatgactttggcaaggtgacaaagcaggaagtcaaagagttcttccgctgggcgcaggatcacgtgaccgaggtggcgcatgagttctacgtcagaaagggtggagccaacaaaagacccgcccccgatgacgcggataaaagcgagcccaagcgggcctgcccctcagtcgcggatccatcgacgtcagacgcggaaggagctccggtggactttgccgacaggtaccaaaacaaatgttctcgtcacgcgggcatgcttcagatgctgtttccctgcaagacatgcgagagaatgaatcagaatttcaacatttgcttcacgcacgggacgagagactgttcagagtgcttccccggcgtgtcagaatctcaaccggtcgtcagaaagaggacgtatcggaaactctgtgccattcatcatctgctggggcgggctcccgagattgcttgctcggcctgcgatctggtcaacgtggacctggatgactgtgtttctgagcaataaatgacttaaaccaggtggcctctatggccatggctgccgatggttatcttccagattggctcgaggacactctctctgaaggaataagacagtggtggaagctcaaacctggcccaccaccaccaaagcccgcagagcggcataaggacgacagcaggggtcttgtgcttcctgggtacaagtacctcggacccttcaacggactcgacaagggagagccggtcaacgaggcagacgccgcggccctcgagcacgacaaagcctacgaccggcagctcgacagcggagacaacccgtacctcaagtacaaccacgccgacgcggagtttcaggagcgccttaaagaagatacgtcttttgggggcaacctcggacgagcagtcttccaggcgaaaaagagggttcttgaacctctgggcctggttgaggaacctgttaagacggctccgggaaaaaagaggccggtagagcactctcctgtggagccagactcctcctcgggaaccggaaaggcgggccagcagcctgcaagaaaaagattgaattttggtcagactggagacgcagactcagtacctgacccccagcctctcggacagccaccagcagccccctctggtctgggaactaatacgatggctacaggcagtggcgcaccaatggcagacaataacgagggcgccgacggagtgggtaattcctcgggaaattggcattgcgattccacatggatgggcgacagagtcatcaccaccagcacccgaacctgggccctgcccacctacaacaaccacctctacaaacaaatttccagccaatcaggagcctcgaacgacaatcactactttggctacagcaccccttgggggtattttgacttcaacagattccactgccacttttcaccacgtgactggcaaagactcatcaacaacaactggggattccgacccaagagactcaacttcaagctctttaacattcaagtcaaagaggtcacgcagaatgacggtacgacgacgattgccaataaccttaccagcacggttcaggtgtttactgactcggagtaccagctcccgtacgtcctcggctcggcgcatcaaggatgcctcccgccgttcccagcagacgtcttcatggtgccacagtatggatacctcaccctgaacaacgggagtcaggcagtaggacgctcttcattttactgcctggagtactttccttctcagatgctgcgtaccggaaacaactttaccttcagctacacttttgaggacgttcctttccacagcagctacgctcacagccagagtctggaccgtctcatgaatcctctcatcgaccagtacctgtattacttgagcagaacaaacactccaagtggaaccaccacgcagtcaaggcttcagttttctcaggccggagcgagtgacattcgggaccagtctaggaactggcttcctggaccctgttaccgccagcagcgagtatcaaagacatctgcggataacaacaacagtgaatactcgtggactggagctaccaagtaccacctcaatggcagagactctctggtgaatccgggcccggccatggcaagccacaaggacgatgaagaaaagttttttcctcagagcggggttctcatctttgggaagcaaggctcagagaaaacaaatgtggacattgaaaaggtcatgattacagacgaagaggaaatcaggacaaccaatcccgtggctacggagcagtatggttctgtatctaccaacctccagagaggcaacagacaagcagctaccgcagatgtcaacacacaaggcgttcttccaggcatggtctggcaggacagagatgtgtaccttcaggggcccatctgggcaaagattccacacacggacggacattttcacccctctcccctcatgggtggattcggacttaaacaccctcctccacagattctcatcaagaacaccccggtacctgcgaatccttcgaccaccttcagtgcggcaaagtttgcttccttcatcacacagtactccacgggacaggtcagcgtggagatcgagtgggagctgcagaaggaaaacagcaaacgctggaatcccgaaattcagtacacttccaactacaacaagtctgttaatgtggactttactgtggacactaatggcgtgtattcagagcctcgccccattggcaccagatacctgactcgtaatctgttgcttgttaatcaataaaccgtttaattcgtttcagttgaactttggtctctgcgtatttctttcttatctagtttccatggctacgtagataagtagcatggcgggttaatcattaactacagcccgggcgtttaaacagcgggcggaggggtggagtcgtgacgtgaattacgtcatagggttagggaggtcctgtattagaggtcacgtgagtgttttgcgacattttgcgacaccatgtggtctcgctgggggggggggcccgagtgagcacgcagggtctccattttgaagcgggaggtttgaacgcggccgcaaaaggccttcttggccaccccgggccgtcgaccaattctcatgtttgacagcttatcatcgaatttctgccattcatccgcttattatcacttattcaggcgtagcaaccaggcgtttaagggcaccaataactgccttaaaaaaattacgccccgccctgccactcatcgcagtactgttgtaattcattaagcattctgccgacatggaagccatcacaaacggcatgatgaacctgaatcgccagcggcatcagcaccttgtcgccttgcgtataatatttgcccatggtgaaaacgggggcgaagaagttgtccatattggccacgtttaaatcaaaactggtgaaactcacccagggattggctgagacgaaaaacatattctcaataaaccctttagggaaataggccaggttttcaccgtaacacgccacatcttgcgaatatatgtgtagaaactgccggaaatcgtcgtggtattcactccagagcgatgaaaacgtttcagtttgctcatggaaaacggtgtaacaagggtgaacactatcccatatcaccagctcaccgtctttcattgccatacggaattccggatgagcattcatcaggcgggcaagaatgtgaataaaggccggataaaacttgtgcttatttttctttacggtctttaaaaaggccgtaatatccagctgaacggtctggttataggtacattgagcaactgactgaaatgcctcaaaatgttctttacgatgccattgggatatatcaacggtggtatatccagtgatttttttctccattttagcttccttagctcctgaaaatctcgataactcaaaaaatacgcccggtagtgatcttatttcattatggtgaaagttggaacctcttacgtgccgatcaacgtctcattttcgccaaaagttggcccagggcttcccggtatcaacagggacaccaggatttatttattctgcgaagtgatcttccgtcacaggtatttattcgcgataagctcatggagcggcgtaaccgtcgcacaggaaggacagagaaagcgcggatctgggaagtgacggacagaacggtcaggacctggattggggaggcggttgccgccgctgctgctgacggtgtgacgttctctgttccggtcacaccacatacgttccgccattcctatgcgatgcacatgctgtatgccggtataccgctgaaagttctgcaaagcctgatgggacataagtccatcagttcaacggaagtctacacgaaggtttttgcgctggatgtggctgcccggcaccgggtgcagtttgcgatgccggagtctgatgcggttgcgatgctgaaacaattatcctgagaataaatgccttggcctttatatggaaatgtggaactgagtggatatgctgtttttgtctgttaaacagagaagctggctgttatccactgagaagcgaacgaaacagtcgggaaaatctcccattatcgtagagatccgcattattaatctcaggagcctgtgtagcgtttataggaagtagtgttctgtcatgatgcctgcaagcggtaacgaaaacgatttgaatatgccttcaggaacaatagaaatcttcgtgcggtgttacgttgaagtggagcggattatgtcagcaatggacagaacaacctaatgaacacagaaccatgatgtggtctgtccttttacagccagtagtgctcgccgcagtcgagcgacagggcgaagccctcgagtgagcgaggaagcaccagggaacagcacttatatattctgcttacacacgatgcctgaaaaaacttcccttggggttatccacttatccacggggatatttttataattattttttttatagtttttagatcttcttttttagagcgccttgtaggcctttatccatgctggttctagagaaggtgttgtgacaaattgccctttcagtgtgacaaatcaccctcaaatgacagtcctgtctgtgacaaattgcccttaaccctgtgacaaattgccctcagaagaagctgttttttcacaaagttatccctgcttattgactcttttttatttagtgtgacaatctaaaaacttgtcacacttcacatggatctgtcatggcggaaacagcggttatcaatcacaagaaacgtaaaaatagcccgcgaatcgtccagtcaaacgacctcactgaggcggcatatagtctctcccgggatcaaaaacgtatgctgtatctgttcgttgaccagatcagaaaatctgatggcaccctacaggaacatgacggtatctgcgagatccatgttgctaaatatgctgaaatattcggattgacctctgcggaagccagtaaggatatacggcaggcattgaagagtttcgcggggaaggaagtggttttttatcgccctgaagaggatgccggcgatgaaaaaggctatgaatcttttccttggtttatcaaacgtgcgcacagtccatccagagggctttacagtgtacatatcaacccatatctcattcccttctttatcgggttacagaaccggtttacgcagtttcggcttagtgaaacaaaagaaatcaccaatccgtatgccatgcgtttatacgaatccctgtgtcagtatcgtaagccggatggctcaggcatcgtctctctgaaaatcgactggatcatagagcgttaccagctgcctcaaagttaccagcgtatgcctgacttccgccgccgcttcctgcaggtctgtgttaatgagatcaacagcagaactccaatgcgcctctcatacattgagaaaaagaaaggccgccagacgactcatatcgtattttccttccgcgatatcacttccatgacgacaggatagtctgagggttatctgtcacagatttgagggtggttcgtcacatttgttctgacctactgagggtaatttgtcacagttttgctgtttccttcagcctgcatggattttctcatactttttgaactgtaatttttaaggaagccaaatttgagggcagtttgtcacagttgatttccttctctttcccttcgtcatgtgacctgatacgcgtgctaccttaagagagtcaattcgcccttcccggtcgatatgaacagcttatttacataattcacgttattggtagttataaatgaaattcctaatatcggttatgaagtgaaattgaatttctacttgatctttctctctatttttgtaaaataaaattaagaatatttaaatattcaatgattcatttttgcagaaatcggaggaagaagaatatatgaaaacatttaacatttctcaacaagatccccccatattgttgtataagtgatgaaatactgaatttaaaacttagtttatatgtggtaaaatgttttaatcaagtttaggaggaattaattatgaagtgtaatgaataatgaatgtaacagggttcaattaaaagagggaagcgtatcattaaccctataaactacgtctgccctcattattggagggtgaaatgtgaatacatcctattcacaatcgaatttacgacacaaccaaattttaatttggctttgcattttatctttttttagcgtattaaatgaaatggttttgaacgtctcattacctgatattgcaaatgattttaataaaccaccagcgagtacaaactgggtgaacacagcctttatgttaaccttttccattggaacagctgtatatggaaagctatctgatcaattaggcatcaaaaggttactcctatttggaattataataaattgtttcgggtcggtaattgggtttgttggccattctttcttttccttacttattatggctcgttttattcaaggggctggtgcagctgcatttccagcactcgtaatggttgtagttgcgcgctatattccaaaggaaaataggggtaaagcatttggtcttattggatcgatagtagccatgggagaaggagtcggtccagcgattggtggaatgatagcccattatattcattggtcctatcttctactcattcctatgataacaattatcactgttccgtttcttatgaaattattaaagaaagaagtaaggataaaaggtcattttgatatcaaaggaattatactaatgtctgtaggcattgtattttttatgttgtttacaacatcatatagcatttcttttcttatcgttagcgtgctgtcattcctgatatttgtaaaacatatcaggaaagtaacagatccttttgttgatcccggattagggaaaaatataccttttatgattggagttctttgtgggggaattatatttggaacagtagcagggtttgtctctatggttccttatatgatgaaagatgttcaccagctaagtactgccgaaatcggaagtgtaattattttccctggaacaatgagtgtcattattttcggctacattggtgggatacttgttgatagaagaggtcctttatacgtgttaaacatcggagttacatttctttctgttagctttttaactgcttcctttcttttagaaacaacatcatggttcatgacaattataatcgtatttgttttaggtgggctttcgttcaccaaaacagttatatcaacaattgtttcaagtagcttgaaacagcaggaagctggtgctggaatgagtttgcttaactttaccagctttttatcagagggaacaggtattgcaattgtaggtggtttattatccatacccttacttgatcaaaggttgttacctatggaagttgatcagtcaacttatctgtatagtaatttgttattacttttttcaggaatcattgtcattagttggctggttaccttgaatgtatataaacattctcaaagggatttctaaatcgttaagggatcaactttgggagagagttcaaaattgatcctttttttataacaggaattgggcatcaaataaaacgaaaggctcagtcgaaagactgggcctttcgttttatctgttgtttgtcggtgaacgctctcctgagtaggacaaatccgccgggagcggatttgaacgttgcgaagcaacggcccggagggtggcgggcaggacgcccgccataaactgccaggcatcaaattaagcagaaggccatcctgacggatggcctttttgcgtttctacaaactcttcctgtcgtcatatctacaattctacacagcccagtccagactattcggcactgaaattatgggtgaagtggtcaagacctcactaggcaccttaaaaatagcgcaccctgaagaagatttatttgaggtagcccttgcctacctagcttccaagaaagatatcctaacagcacaagagcggaaagatgttttgttctacatccagaacaacctctgctaaaattcctgaaaaattttgcaaaaagttgttgactttatctacaaggtgtggcataatgtgtggaattgtgagcggataacaattaagctaattctatggtaaaagcattcctgaacccaatatccttatttttagtggacaaggccttgttctcatatggttgcttgagccagtgccttacaaggctcttccgctttggcaggctgttcaaaattatttattagagcaactcaaggaactaggcggagatccaaaagcaaccgatgcagcacgtgtttttcggattgctgggagcgtcaatagtaagaatggagcggaagtaagagcggaatatcggcacgattacagatatgagttaaggcagattcaatttgattaccttccagaactcaatgaggttattaatcccgctccacaaaagaaaaaacgggggcgtaaaaagaaagtagttcagttattcaatacctacaaactccattacgctcgcctattggatatagtgaaattggtggaactacgaaattatgaggtaactggatacagggaaatcatttgctttttataccgttattggttgtgctgttacacgaacgaccctgtagaggctttaaatcaaacacagacacttaatttacagttcactgagcctttacccttaaaagaggttgaaagggctacacggagcgcagaaaaggcgtgggaagcacgaaataacgaagaggctaaccggattgcaatcgaaaaaggatatcccagtgctggatacaatattagcaataaaaagttgattgaatggctagatatcacaccagaagaacagaagcatttacagacgattatagacgctaatgagaaacggagaagaaagcgggaaagggataggatttatcaagaacaaaaacgtcgtgagcggggagatatgacccgacaggagtatattaagcaacaacaggataaaacagatgataaattatttaaattgcaggagttattagaacagaatcccaaaatctcaaaaattaaattagcaaaaatacttggtgtagataaatcgcacttatacagactgctgaaacaactataactggaaaaaattagtgtctcatggttcgtcgcccttatattatgggcgttagcctgcttgctaattggataggtgttattgtcatttcaacgtcggacgttttggtagatgaacgtcggacgttatttgcttcaatagattgttgatgtattaagggttgcagtgaatcgacaagcaaaaagttatgacgttgtgaaaaaattgaatagaaaattggaaattacgtcggacgttctaacttaaaaaccctgttatatcaatgatttaaaaggaaattaacgtcataaaagacctttctgcaacaaaagtttttctggaagagttgaggttattttataggtattatggacttttgtagactttttgtgtactttttgtggactccacactcgctggtatcgtgttattttttaattgagatatgaatatggaaattaaacgttttaggcgttggtttggtgatgacaaaaaaataagagtacccgctcacaacggatactctttcgagaaatgtacgaaacgctataaataaaaaataactagatacatttacattgtatcacgtttcgtacatttctccaataacaaattgattggaggaatgcaaagtgaataatgaaccagtaaaacgtggtaagaagaacagatgggaattaaacctacctataatgacttatgtagtagctgatgattggattgataaactaggacacgaaacgtttactttatggttgaggttccatacttgggtagatagagaagatgaactccgagattatgatcgcatacctagaagttttgagaacatatataaaaagacactaggaatctcaaaaagtaagttttatagattgataaaacctttatgggaatatggattaatagacatcatagaatacgaagaatctaaccgtaattctactaaacctaaaaatataattgtttatgagtatcctttacacgaaatagaaagaaagtataaaccactagaaaaattaagagattgggataaagactataattccgtttctaaagaattaggtaaaacaggtggtagaccaaggaaaaaagatagtgaagaagaacccgaaaagaaacccgaagaagtaactaaaaagaaacgtaaatataagttaaaaagagttatccacaacggtttcaaaaatgaaacggtggagggtttcaaaaatgaaacggtggagggtttcaaaaatgaaacggtgaccgtttcaaaaataaaacccaataattattcaaatatctttaataacttatcaaatatttctactaatgtttcaaataatttattaattgatgatgatgaggaaatcgaaaatgaaccaactggtcgtacaataaataggtcattacttttttcacaagaagatattaaacaggcctatcaatttattaatagattttcagttatacagttacgtgaaaactttagctttgataaacactttgaagaacggttggtatgttatttatggaaagcagggatttctactttttacacgcacgaaatcagtaaaatgataaaaaaaatagcagactatgaaaaatctaaaaaaggtagattaaacccaatacgtgaccgagccttatatatggtaaatggtcttgtaatgaatagagcttcttcccaaagtgaacatgctacttataaactaaaccaatataaaaaacagaaggaacaggaaaaacaacaacaggagcaacaaagatcaagagtaccgttctataattggttggaggaaagagaagaacaaaccgaaggtcaactacccaccacttaaagcctaacggcttttgaagtggggcttgtaaaaagccctagttgactaccccaagtctttcgaggactacgttggaaaggtcatgacacctacaaatgctcctctagttcgtagccactgtcgttgatggttaaaagtcctgatgggtagggacggtgctgtcaacatcacaagcccttccaacatgggggaagaggaagaacactccgagaaaggagggggctgtcgtacacgccttgttcgtgtacgtgatttttaacacttttatctctaatataatctctccttgagttagcagagactaagaataaaacacattaggattttttatctacataaggaggttcaatacatgcctactatttcgtttaagggaaagtcttttgtacaaaatcatcacttgactgtaaaatatcatgaattgatcccagaaccagaaaaaagtctgaccgataaagttagtcttcatgacaatcttatcattcatggggacaatttaaaggcgttgaaagctctactacctacatatgctggtaagatagattgcatctatattgacccaccatacaatactggaactgaaaaatggatttataatgataatgtcaactccccaatgattagggaatggcttggaaaagtggtagacaaagaagacttatcccgacatgataagtggctttgtatgatgatgccgaggttaaaactgttgaaagagttgttgtcagaagacggagtgatatttgtaagcattgactacaatgaaatacaccatcttacgtgccttatgaacgaaatattcggtgaggagaattttcgtgacgctattatcattcgtagaggagtaaaaaatgttcaagcgcaatttgacacaattgattctctttcaaatggttatgagtctattttggtttacactaaacagccatctcgacgatttaataaggtttatgaagatgtagaagaaaagcctggtagttggaataatcattggagaggtacagaccgtaaaactatgagatatgaattatttggggttactccgacagaaggtcaatggagatgggggaaagaacgtagtctccaggctattgaaaactatcaaatgatgttagatgaacttagacaaaaaggcattactaatccaactcaagaggatattgataaatggtatcttgaatatgtagaaaataatggggaagatattgacttgttacgacaaaatgataatggcacgattgagcactttgttccaccgactagcaaaaagttgttaagtaatgcctggtttgacttaaaacccaacggttctagtcaattaaagaagatatttggaaggaaggttttcgataaccctaaatcaattgatttggtaaaaagactaatacaatttgcgactgaaaacaaagaagcgattgtacttgactcatttgcagggagtggcactactgctcatgcagtattatcgcttaacaaacaagatggagggaatcgtcgtttcatccttattgagatggaagaatatgcacatgagattaccgcagaacgcggatctttatcgatttgcatgcaagctaattcggtggaaacgaggtcatcatttccttccgaaaaaacggttgcatttaaatcttacatatgtaatactttcaaagactacatttgtaagatttgatgtttgagtcggctgaaagatcgtacgtaccaattattgtttcgtgattgttcaagccataacactgtagggatagtggaaagagtgcttcatctggttacgatcaatcaaatattcaaacggagggagacgattttgatgaaaccagtaacgttatacgatgtcgcagagtatgccggtgtctcttatcagaccgtttcccgcgtggtgaaccaggccagccacgtttctgcgaaaacgcgggaaaaagtggaagcggcgatggcggagctgaattacattcccaaccgcgtggcacaacaactggcgggcaaacagtcgttgctgattggcgttgccacctccagtctggccctgcacgcgccgtcgcaaattgtcgcggcgattaaatctcgcgccgatcaactgggtgccagcgtggtggtgtcgatggtagaacgaagcggcgtcgaagcctgtaaaacggcggtgcacaatcttctcgcgcaacgcgtcagtgggctgatcattaactatccgctggatgaccaggatgccattgctgtggaagctgcctgcactaatgttccggcgttatttcttgatgtctctgaccagacacccatcaacagtattattttctcccatgaagacggtacgcgactgggcgtggagcatctggtcgcattgggtcaccagcaaatcgcgctgttagcgggcccattaagttctgtctcggcgcgtctgcgtctggctggctggcataaatatctcactcgcaatcaaattcagccgatagcggaacgggaaggcgactggagtgccatgtccggttttcaacaaaccatgcaaatgctgaatgagggcatcgttcccactgcgatgctggttgccaacgatcagatggcgctgggcgcaatgcgcgccattaccgagtccgggctgcgcgttggtgcggatatctcggtagtgggatacgacgataccgaagacagctcatgttatatcccgccgttaaccaccatcaaacaggattttcgcctgctggggcaaaccagcgtggaccgcttgctgcaactctctcagggccaggcggtgaagggcaatcagctgttgcccgtctcactggtgaaaagaaaaaccaccctggcgcccaatacgcaaaccgcctctccccgcgcgttggccgattcattaatgcagctggcacgacaggtttcccgactggaaagcgggcagtgagcgcaacgcaattaatgtgagttaggatcgctaccttaagagagacgcgttatcgggggttagttcgtcatcattgatgagggttgattatcacagtttattactctgaattggctatccgcgtgtgtacctctacctggagtttttcccacggtggatatttcttcttgcgctgagcgtaagagctatctgacagaacagttcttctttgcttcctcgccagttcgctcgctatgctcggttacacggctgcggcgagcgctagtgataataagtgactgaggtatgtgctcttcttatctccttttgtagtgttgctcttattttaaacaactttgcggttttttgatgactttgcgattttgttgttgctttgcagtaaattgcaagatttaataaaaaaacgcaaagcaatgattaaaggatgttcagaatgaaactcatggaaacacttaaccagtgcataaacgctggtcatgaaatgacgaaggctatcgccattgcacagtttaatgatgacagcccggaagcgaggaaaataacccggcgctggagaataggtgaagcagcggatttagttggggtttcttctcaggctatcagagatgccgagaaagcagggcgactaccgcacccggatatggaaattcgaggacgggttgagcaacgtgttggttatacaattgaacaaattaatcatatgcgtgatgtgtttggtacgcgattgcgacgtgctgaagacgtatttccaccggtgatcggggttgctgcccataaaggtggcgtttacaaaacctcagtttctgttcatcttgctcaggatctggctctgaaggggctacgtgttttgctcgtggaaggtaacgacccccagggaacagcctcaatgtatcacggatgggtaccagatcttcatattcatgcagaagacactctcctgcctttctatcttggggaaaaggacgatgtcacttatgcaataaagcccacttgctggccggggcttgacattattccttcctgtctggctctgcaccgtattgaaactgagttaatgggcaaatttgatgaaggtaaactgcccaccgatccacacctgatgctccgactggccattgaaactgttgctcatgactatgatgtcatagttattgacagcgcgcctaacctgggtatcggcacgattaatgtcgtatgtgctgctgatgtgctgattgttcccacgcctgctgagttgtttgactacacctccgcactgcagtttttcgatatgcttcgtgatctgctcaagaacgttgatcttaaagggttcgagcctgatgtacgtattttgcttaccaaatacagcaatagtaatggctctcagtccccgtggatggaggagcaaattcgggatgcctggggaagcatggttctaaaaaatgttgtacgtgaaacggatgaagttggtaaaggtcagatccggatgagaactgtttttgaacaggccattgatcaacgctcttcaactggtgcctggagaaatgctctttctatttgggaacctgtctgcaatgaaattttcgatcgtctgattaaaccacgctgggagattagataatgaagcgtgcgcctgttattccaaaacatacgctcaatactcaaccggttgaagatacttcgttatcgacaccagctgccccgatggtggattcgttaattgcgcgcgtaggagtaatggctcgcggtaatgccattactttgcctgtatgtggtcgggatgtgaagtttactcttgaagtgctccggggtgatagtgttgagaagacctctcgggtatggtcaggtaatgaacgtgaccaggagctgcttactgaggacgcactggatgatctcatcccttcttttctactgactggtcaacagacaccggcgttcggtcgaagagtatctggtgtcatagaaattgccgatgggagtcgccgtcgtaaagctgctgcacttaccgaaagtgattatcgtgttctggttggcgagctggatgatgagcagatggctgcattatccagattgggtaacgattatcgcccaacaagtgcttatgaacgtggtcagcgttatgcaagccgattgcagaatgaatttgctggaaatatttctgcgctggctgatgcggaaaatatttcacgtaagattattacccgctgtatcaacaccgccaaattgcctaaatcagttgttgctcttttttctcaccccggtgaactatctgcccggtcaggtgatgcacttcaaaaagcctttacagataaagaggaattacttaagcagcaggcatctaaccttcatgagcagaaaaaagctggggtgatatttgaagctgaagaagttatcactcttttaacttctgtgcttaaaacgtcatctgcatcaagaactagtttaagctcacgacatcagtttgctcctggagcgacagtattgtataagggcgataaaatggtgcttaacctggacaggtctcgtgttccaactgagtgtatagagaaaattgaggccattcttaaggaacttgaaaagccagcaccctgatgcgaccacgttttagtctacgtttatctgtctttacttaatgtcctttgttacaggccagaaagcataactggcctgaatattctctctgggcccactgttccacttgtatcgtcggtctgataatcagactgggaccacggtcccactcgtatcgtcggtctgattattagtctgggaccacggtcccactcgtatcgtcggtctgattattagtctgggaccacggtcccactcgtatcgtcggtctgataatcagactgggaccacggtcccactcgtatcgtcggtctgattattagtctgggaccatggtcccactcgtatcgtcggtctgattattagtctgggaccacggtcccactcgtatcgtcggtctgattattagtctggaaccacggtcccactcgtatcgtcggtctgattattagtctgggaccacggtcccactcgtatcgtcggtctgattattagtctgggaccacgatcccactcgtgttgtcggtctgattatcggtctgggaccacggtcccacttgtattgtcgatcagactatcagcgtgagactacgattccatcaatgcctgtcaagggcaagtattgacatgtcgtcgtaacctgtagaacggagtaacctcggtgtgcggttgtatgcctgctgtggattgctgctgtgtcctgcttatccacaacattttgcgcacggttatgtggacaaaatacctggttacccaggccgtgccggcacgttaaccgggctgcatccgatgcaagtgtgtcgctgtcgacgagctcgcgagctcggacatgaggttgccccgtattcagtgtcgctgatttgtattgtctgaagttgtttttacgttaagttgatgcagatcaattaatacgatacctgcgtcataattgattatttgacgtggtttgatggcctccacgcacgttgtgatatgtagatgataatcattatcactttacgggtcctttccggtgatccgacaggttacggggcggcgacctcgcgggttttcgctatttatgaaaattttccggtttaaggcgtttccgttcttcttcgtcataacttaatgtttttatttaaaataccctctgaaaagaaaggaaacgacaggtgctgaaagcgagctttttggcctctgtcgtttcctttctctgtttttgtccgtggaatgaacaatggaagtccgagctcatcgctaataacttcgtatagcatacattatacgaagttatattcgatgcggccgcaagcttgaagagctcttctttcagaacgctcggttgccgccgggcgttttttatgagacgtctcggcctgtttggccatta

SEQ ID NO: 3 - DNA, 30663 bp, synthetic construct
  misc_feature 1..30663: note = seed plasmid 3
  source 1..30663: mol_type = other DNA
gcggccgcttggccactccctctctgcgcgctcgctcgctcactgaggccgggcgaccaaaggtcgcccgacgcccgggctttgcccgggcggcctcagtgagcgagcgagcgcgcagagagggagtggccaactccatcactaggggttcctggccttgatggccaattcgattcgattagggcctacttggcctaatagtaatcaattacggggtcattagttcatagcccatatatggagttccgcgttacataacttacggtaaatggcccgcctggctgaccgcccaacgacccccgcccattgacgtcaataatgacgtatgttcccatagtaacgccaatagggactttccattgacgtcaatgggtggagtatttacggtaaactgcccacttggcagtacatcaagtgtatcatatgccaagtacgccccctattgacgtcaatgacggtaaatggcccgcctggcattatgcccagtacatgaccttatgggactttcctacttggcagtacatctacgtattagtcatcgctattaccatggtgatgcggttttggcagtacatcaatgggcgtggatagcggtttgactcacggggatttccaagtctccaccccattgacgtcaatgggagtttgttttggcaccaaaatcaacgggactttccaaaatgtcgtaacaactccgccccattgacgcaaatgggcggtaggcgtgtacggtgggaggtctatataagcagagctggtttagtgaaccgtcagatgccaccatggtgagcaagggcgaggagctgttcaccggggtggtgcccatcctggtcgagctggacggcgacgtaaacggccacaagttcagcgtgtccggcgagggcgagggcgatgccacctacggcaagctgaccctgaagttcatctgcaccaccggcaagctgcccgtgccctggcccaccctcgtgaccaccctgacctacggcgtgcagtgcttcagccgctaccccgaccacatgaagcagcacgacttcttcaagtccgccatgcccgaaggctacgtccaggagcgcaccatcttcttcaaggacgacggcaactacaagacccgcgccgaggtgaagttcgagggcgacaccctggtgaaccgcatcgagctgaagggcatcgacttcaaggaggacggcaacatcctggggcacaagctggagtacaactacaacagccacaacgtctatatcatggccgacaagcagaagaacggcatcaaggtgaacttcaagatccgccacaacatcgaggacggcagcgtgcagctcgccgaccactaccagcagaacacccccatcggcgacggccccgtgctgctgcccgacaaccactacctgagcacccagtccgccctgagcaaagaccccaacgagaagcgcgatcacatggtcctgctggagttcgtgaccgccgccgggatcactctcggcatggacgagctgtacaagtaagggtggcatccctgtgacccctccccagtgcctctcctggccctggaagttgccactccagtgcccaccagccttgtcctaataaaattaagttgcatcattttgtctgactaggtgtccttctataatattatggggtggaggggggtggtatggagcaaggggcaagttgggaagacaacctgtagggcctgcggggtctattgggaaccaagctggagtgcagtggcacaatcttggctcactgcaatctccgcctcctgggttcaagcgattctcctgcctcagcctcccgagttgttgggattccaggcatgcatgaccaggctcagctaatttttgtttttttggtagagacggggtttcaccatattggccaggctggtctccaactcctaatctcaggtgatctacccaccttggcctcccaaattgctgggattacaggcgtgaaccactgctcccttccctgtccttaggaacccctagtgatggagttggccactccctctctgcgcgctcgctcgctcactgaggccgggcgaccaaaggtcgcccgacgcccgggctttgcccgggcggcctcagtgagcgagcgagcgcgcagagagggagtggccaaggcctgattggccgtagatgtacctggacatccaggtgattcctgcggcggtagtggaagcccgaggaaactcgcgtacgcggttccaaatgttgcgtagcggcatgaagtagttcattgtaggcacggtttgaccagtgaggcgcgcgcagtcattgatgctctatagacacgaagaaaatgaaagcgttcagcgactcgactctgtagcctggaggaacgtgaacgggttgggtcgcggtgtaccccggttcaagacttgtactcgagccggccggagccgcggctaacgtggtattggcactcccgtctcgacccagcctacaaaaatccaggatacggaatcgagtcgttttgctggttgctgaatggcagggaagtgagtcctatttttttttttgccgctcagatgcatcccgtgctgcgacagatgcgtccccaacaacagcccccctcgcagcagcagcaaccacaaaaggctgtccctgcaactactgcaactgccgccgactggagtgccaaacaacatgcttcattctcctaaagtccagcccaccctgtgtgacaatcaaaaagcactctaccattttctcaatacccattcgccttattttcgctcccatcgtacacacatcgaaagggccactgcgttcgaccgtatggatgtgcaataatgactcatgtaaacaacgtgttgaataaacagcactttattttttacacgtatcaaggctctggattacttatttatttacaagtcgaatgggttctgacgagaatcagaatgacccgcgggcagtgatacgttgcggaactgatacttgggttgccacttgaattcgggaatcaccaacttgggaaccggtatatcgggtaggatgtcactccacagctttctggtcagctgcaaagctcccagcaggtcaggagccgaaatcttgaaatcacaattaggaccagtgctctgagcgcgagagttgcggtacaccggattgcagcactgaaacaccatcagcgacggatgtctcacgcttgccagcacggtgggatctgcaatcatgcccacatccagatcttcagcattggcaatgctgaacggggtcatcttgcaggtctgcctacccatggcgggcacccaattaggcttgtggttgcaatcgcagtgcagggggattagtatcatcttggcctgatcctgtctgattcctggatacacggctctcatgaaagcatcatattgcttgaaagcctgctgggctttactaccctcggtatagaacatcccgcaggacctgctcgaaaactggttagctgcgcagccggcatcattcacacagcagcgggcgtcattgttggctatttgcaccacacttctgccccagcggttttgggtgattttggttcgctcgggattctccttcaaggctcgttgtccattctcgctggccacatccatctcgataatctgctccttctgaatcataatagtgccatgcaggcacttcagcttgccctcataatcattgcagccatgaggccacaacgcacagcctgtacattcccaattatggtgggcgatctgagaaaaagaatgtatcattccctgcagaaatcttcccatcatcgtgctcagtgtcttgtgactagtgaaagttaactggatgcctcggtgctcctcgtttacgtactggtgacagatgcgcttgtattgttcgtgctgctcaggcattagtttaaaagaggttctaagttcgttatccagcctgtacttctccatcagtacacacatcacttccatgcccttctcccaagcagacaccaggggcaagctaatcggattcttaacagtacaggcagcagctcctttagccagaggatcatctttggcaatcttttcaatgcttcttttgccatccttctcaacgatgcgcacgggcgggtagctgaaacctactgctacaagctgcgcctcttctctttcttcttcgctgtcttgactgatgtcttgcatgggaacatgtttggtcttccttggcttctttttggggggtatcgggggaggaggactgtcgctccgttccggagacagggaggattgtgaagtttcgctcaccattaccaactgactgtcggtagaagaacctgaccccacacggcgacaggtgtttctcttcgggggcagaggtggaggcgattgcgaagggctgcggtccgacctggaaggcggatgactggcagaaccccttccgcgttcgggggtgtgctccctgtggcggtcgcttaactgatttccttcgcggctggccattgtgttctcctaggcagagaaacaacagacatggaaactcagccattgctgtcaacatcgccacaagtgccatcacatctcgtcgtcagcgacgaggaaaaggagcagagcttaaccattccaccgcccagtcctgccaccacctctaccctagaagataaggaggtcgacgcatctcatgacatgcagaataaaaaagcgaaagagtctgaaacagacatcgagcaagacccgggctatgtgacaccggtggaacacgaggaagagttgaaacgctttctagagagagaggatgaaaactgcccaaaacagcaagcggataactatcaccaagatgctggaaatagggatcagaacaccgactacctcatagggcttgacggggaagacgcgctccttaaacatctagcaagacagtcactcatagtcaaggatgcattattggacagaactgaagtgcccatcagtgtggaagagctcagccgcgcctacgagcttaaccttttttcacctcgtactccccccaaacgccagccaaacggcacctgcgagccaaatcctcgcttaaacttttatccagcttttgctgtgccagaagtactcgctacttatcacatcttttttaaaaatcaaaaaattccagtctcctgccgcgctaatcgcacccgcgctgacgccctacttaatctgggacctggttcacgcttacctgatatagcttccttggaagaggttccaaaaatcttcgagggtctgggcaataatgagactcgggccgcaaatgctctgcaaaagggagaaaatggcatggatgagcatcacagcgttctggtggaattggagggcgataatgccagactcgcagtactcaagcgaagcgtcgaggtcacacactttgcataccccgctgtcaacctgccccctaaagttatgacggcggtcatggaccagttactcattaagcgcgcaagtcccctttcagaagacatgcatgacccagacgcctgtgatgagggtaaaccagtggtcagtgatgagcagctaacccgatggctggacaccgactctccccgggatttggaagagcgtcgcaagcttatgatggccgtagtgctggttaccgtagaactagagtgtctccggcgtttctttaccgattcagaaaccttgcgcaaactcgaagagaatctgcactacacttttagacacggctttgtgcggcaggcgtgcaagatatctaacgtggaactcaccaacctggtttcctacatgggtattctgcatgagaatcgtctaggacaaagcgtgctgcacagcacccttaagggggaagcccgccgtgattacatccgcgattgtgtctatctctacctgtgccacacgtggcaaaccggcatgggtgtatggcagcaatgtttagaagaacagaacttgaaagagcttaacaagctcttacagaaatctcttaaggttctgtggacagggttcgacgagcgcaccgtcgcttccgacctggcagacctcatcttcccagagcgtcttagggttactttgcgaaacggactgcctgactttatgagccagagcatgcttaacaattttcgctctttcatcctggaacgctccggtatcctgcccgccacctgctgcgcactgccctccgactttgtgcctctcacctaccgcgagtgccccccgccgctatggagtcactgctacctgttccgtctggccaactacctctcctaccactcggatgtgatcgaggatgtgagcggagacggcttgctggagtgtcactgccgctgcaatctgtgcacgccccaccggtccctagcttgcaacccccagttgatgagcgaaacccagataataggcacctttgaactgcaaggccccagcagccaaggcgatgggtcttctcctgggcaaagtttaaaactgaccccgggactgtggacctctgcctacttgcgcaagtttgccccggaagattaccacccctatgaaatcaagttctatgaggaccaatcacagcctccaaaggccgaactttcggcctgcgtcatcacccagggggcaattctagcccaattgcaagccatccaaaaatcccgccaagaatttctactgaaaaagggtaagggggtctaccttgacccccagaccggcgaggaactcaacacaaggttccctcaggatgtcccaacgacgagaaagcaagaagttgaaggtgcagccgccgcccccagaagatatggaggaagattgggacagtcaggcagaggaagcggaggaggacagtctggaggacagtctggaggaagacagtttggaggaggaaaacgaggaggcagaggaggtggaagaagtaaccgccgacaaacagttatccccggctgcggagacaagcaacagcgctatcatctccgctccgagtcgaggaacgcggcggcgtcccagcagtagatgggacgagaccggacgcttcccgaacccaaccaccgcttccaagaccggtaagaaggatcggcagggatacaagtcctggcgggggcataagaatgccatcatctcctgcttgcatgagtgcgggggaaacatatccttcacgcgacgctacttgctattccaccatggggtgaactttccacgcaatgttttgcattactaccgtcacctccacagcccctactatagccagcaaatcccggcaatctcgacagaaaaagacagcggcggcgacctccaacagaaaaccagcagcggcagttaaaaaatacacaacaagtgcagcaacaggaggattaaagattacagccaacgagccagcgcaaacccgagagctaagaaatcggatctttccaaccctgtatgccatcttccagcagagtcggggccaagagcaggaactgaaaataaaaaaccgatctttgcgttcgctcaccagaagttgtttgtatcacaagagcgaagatcaacttcagcgcactcttgaggacgccgaggctctcttcaacaagtactgcgcgctgactcttaaagagtaggcagcgaccgcgcttattcaaaaaaggcgggaattacatcatcctcgtcatgagtaaagaaattcccacgccttacatgtggagttatcagccccaaatgggattggcggcaggcgcctcccaggactactccacccgcatgaattggctcagcgccgggccttctatgatttctcgagttaatgatatacgcgcctaccgaaaccaaatacttttggaacagtcagctcttaccaccacgccccgccaacaccttaatcccagaaattggcccgccgccctagtataccaggaaagtcccgctcccaccactgtattacttcctcgagacgcccaggccgaagtccaaatgactaatgcaggtgcgcagttagctggcggctccaccctatgtcgtcacaggcctcggtgcttaaccaaagagcaataagagctgatacatcatattgtattcgtataacttggtcctggaacacaggagatgccccagaggggcaaacctctgctacaaccctagttacctccccatttaccttttactacatcagagaagacgactgacaaataaagtttaacttgtttatttgaaaatcaattcacaaactccgagtagttattttgcctcccccttcccatttaacagaatataccaatctctccccacgcacagctttaaacatttggataccattagagatagacatggttttagattccacattccaaacagtttcagagcgagccaatctggggtcagtgatagataaaaatccatcgggatagtcttttaaagcgctttcacagtccaactgatgcggatgcgactccggagtctggatcacggtcatctggaagaagaacgatgggaatcataatccgaaaacgggatcgggcgattgtgtctcatcaaacccacaagcagccgctgtctgcgtcgctccgtgcgactgctgtttatgggatcgggatccacagtgtcctgaagcatgattttaatagcccttaacattaactttctggtgcgatgcgcgcagcaacgcattcttatttcacttagattaatacagtaggtacagcacattatcacaatattgtttaataaaccataattaaaagcactccagccaaaactcatatctgatataatcgcccctgcatgaccatcataccaaagtttaatataaattaaatgacgttccctcaaaaacacactacccacatacatgatctcttttggcatgtgcatattaacaatctgtctgtaccatggacaacgttggttaatcatgcagcccaatataaccttccggaaccacactgccaacaccgctcccccagccatgcattgaagtgaaccctgctgattacaatgacaatgaagaatccaattctctcgaccgtgaatcacttgagaatgaaaaatatctatagtagcacaacatagacataaatgcatgcatcttctcataatttttaactcctcaggatttagaaacatatcccaaggaataggaagctcttgcagaacagtaaagctggcagaacaaggaagaccacgaacacaacttacactatgcatagtcatagtatcacaatctggcaacagcgggtggtcttcagtcatagaagctcgggtttcattttcctcacaacgtggtaactgggctctggtgtaaggatgatgtctggcgcatgatgtcgagcgtgcgcacaaccttgtcataatggagttgcttcctgacattctcgtattttgtatagcaaaacgcggccctggcagaacacactcttcttcgccttttatcctgccgcttagcgtgttccgtgtgatagttcaagtacagccacactcttaagttggtcaaaagaatgctggcttcagttgtaatcaaaactccatcacatctaatcgttctgaggaaatgatccacggtagcatatgcaaatcccaaccaagcaatgcaactggattgcgtttcaagcaggagaggagagggaagagacggaagaaccatgttaatttttattccaaacgatctcgcagtacttcaaattgtagatcgcgcagatggcatctgtcgcccccactgtgttggtgaaaaagcacagctagatcaaaagaaatgcgattttcaaggtgctcaacggtggcttccagcaaagcctccacgcgcacatccaagaacaaaagaataccaaaagaaggagcattttctaactcctcaatcatcatattacagtcctgcaccattcccagataattttcagctttccagccttggattattcgtgtcatttcttgtggtaaatccaatccacacattacaaacaggtcccggagggcgccctccaccaccattcttaaacacaccctcataatgacaaaatatcttgctcctgtgtcacctgtagcaaattgagaatggcaacatcaattgacatgccgttggctctaagttcttctctaagttctagttgtaaatactctttcatattatcaccaaactgcttagccagaagccccccgggaacaagagcaggacacgctacagtgcagtacaagcgcagacctccccaattggctccagcaaaaacaagattggaataagcatattgggaaccaccagtaatgtcatcaaagttgctggaaatataatcaggcagagtttgttgtaaaaattgaataaaagaaaaatttgccaaaaaaacattcaaaacctctgggatgcaaatgcaataagttaccgcgctgcgctccaacattgttagttttgaatgagtctgcaaaaaataaaaaaacaagcgtcatatcagagtagcctgacgaacaggtggataaatcagtctttccatcacaagacaagccacagggtctccagcccgaccctcgtaaaacctgtcatcgtgattaaacaacagcaccgaaagttcctcgcggtgaccagcatgaataattcttgatgaagcatacaatccaaacatgttagcatcagttaaagacaaaaaacagccaatatagcctctgggtataattatgcttaatcgtaaatatagcaaagccacccctcgcggatacaaagtaaaaggcacaggagaataaaaaatataattattcctttgctgctgttcaggcaacgtcgcccccggtccctctaaatacacatacaaagcctcatcagccatggcttaccagacaaagtacagcaggcacacaaagcacaagctctaaagtcactcaccaacctgtccacagtatatatacacaaaccctaaactgacgtaatggggctaaagtacacaaaatcccgccaaacccaacacacaccccgaaactgcgtcaccacaaaagtacagtttcacttccgcaatcccaacaagcggcacttcctctttctcacgggacgtcacatccgcttaacttgcaaccggcctatgtggccggaggggtggagtcgtgacgtgaattacgtcatagggttagggaggtcctgtattagaggtcacgtgagtgttttgcgacattttgcgacaccatgtggtcacgctgggtatttaagcccgagtgagcacgcagggtctccattttgaagcgggaggtttgaacgcgcagccgccatgccggggttttacgagattgtgattaaggtccccagcgaccttgacgagcatctgcccggcatttctgacagctttgtgaactgggtggccgagaaggaatgggagttgccgccagattctgacatggatctgaatctgattgagcaggcacccctgaccgtggccgagaagctgcagcgcgactttctgacggaatggcgccgtgtgagtaaggctccggaggcccttttctttgtgcaatttgagaagggagagagctacttccacatgcacgtgctcgtggaaaccaccggggtgaaatccatggttttgggacgtttcctgagtcagattcgcgaaaaactgattcagagaatttaccgcgggatcgagccgactttgccaaactggttcgcggtcacaaagaccagaaatggcgccggaggcgggaacaaggtggtggatgagtgctacatccccaattacttgctccccaaaacccagcctgagctccagtgggcgtggactaatatggaacagtatttaagcgcctgtttgaatctcacggagcgtaaacggttggtggcgcagcatctgacgcacgtgtcgcagacgcaggagcagaacaaagagaatcagaatcccaattctgatgcgccggtgatcagatcaaaaacttcagccaggtacatggagctggtcgggtggctcgtggacaaggggattacctcggagaagcagtggatccaggaggaccaggcctcatacatctccttcaatgcggcctccaactcgcggtcccaaatcaaggctgccttggacaatgcgggaaagattatgagcctgactaaaaccgcccccgactacctggtgggccagcagcccgtggaggacatttccagcaatcggatttataaaattttggaactaaacgggtacgatccccaatatgcggcttccgtctttctgggatgggccacgaaaaagttcggcaagaggaacaccatctggctgtttgggcctgcaactaccgggaagaccaacatcgcggaggccatagcccacactgtgcccttctacgggtgcgtaaactggaccaatgagaactttcccttcaacgactgtgtcgacaagatggtgatctggtgggaggaggggaagatgaccgccaaggtcgtggagtcggccaaagccattctcggaggaagcaaggtgcgcgtggaccagaaatgcaagtcctcggcccagatagacccgactcccgtgatcgtcacctccaacaccaacatgtgcgccgtgattgacgggaactcaacgaccttcgaacaccagcagccgttgcaagaccggatgttcaaatttgaactcacccgccgtctggatcatgactttgggaaggtcaccaagcaggaagtcaaagactttttccggtgggcaaaggatcacgtggttgaggtggagcatgaattctacgtcaaaaagggtggagccaagaaaagacccgcccccagtgacgcagatataagtgagcccaaacgggtgcgcgagtcagttgcgcagccatcgacgtcagacgcggaagcttcgatcaactacgcagacaggtaccaaaacaaatgttctcgtcacgtgggcatgaatctgatgctgtttccctgcagacaatgcgagagaatgaatcagaattcaaatatctgcttcactcacggacagaaagactgtttagagtgctttcccgtgtcagaatctcaacccgtttctgtcgtcaaaaaggcgtatcagaaactgtgctacattcatcatatcatgggaaaggtgccagacgcttgcactgcctgcgatctggtcaatgtggatttggatgactgcatctttgaacaataaatgatttaaatcaggtggcctctatggccatggctgccgatggttatcttccagattggctcgaggacactctctctgaaggaataagacagtggtggaagctcaaacctggcccaccaccaccaaagcccgcagagcggcataaggacgacagcaggggtcttgtgcttcctgggtacaagtacctcggacccttcaacggactcgacaagggagagccggtcaacgaggcagacgccgcggccctcgagcacgacaaagcctacgaccggcagctcgacagcggagacaacccgtacctcaagtacaaccacgccgacgcggagtttcaggagcgccttaaagaagatacgtcttttgggggcaacctcggacgagcagtcttccaggcgaaaaagagggttcttgaacctctgggcctggttgaggaacctgttaagacggctccgggaaaaaagaggccggtagagcactctcctgtggagccagactcctcctcgggaaccggaaaggcgggccagcagcctgcaagaaaaagattgaattttggtcagactggagacgcagactcagtacctgacccccagcctctcggacagccaccagcagccccctctggtctgggaactaatacgatggctacaggcagtggcgcaccaatggcagacaataacgagggcgccgacggagtgggtaattcctcgggaaattggcattgcgattccacatggatgggcgacagagtcatcaccaccagcacccgaacctgggccctgcccacctacaacaaccacctctacaaacaaatttccagccaatcaggagcctcgaacgacaatcactactttggctacagcaccccttgggggtattttgacttcaacagattccactgccacttttcaccacgtgactggcaaagactcatcaacaacaactggggattccgacccaagagactcaacttcaagctctttaacattcaagtcaaagaggtcacgcagaatgacggtacgacgacgattgccaataaccttaccagcacggttcaggtgtttactgactcggagtaccagctcccgtacgtcctcggctcggcgcatcaaggatgcctcccgccgttcccagcagacgtcttcatggtgccacagtatggatacctcaccctgaacaacgggagtcaggcagtaggacgctcttcattttactgcctggagtactttccttctcagatgctgcgtaccggaaacaactttaccttcagctacacttttgaggacgttcctttccacagcagctacgctcacagccagagtctggaccgtctcatgaatcctctcatcgaccagtacctgtattacttgagcagaacaaacactccaagtggaaccaccacgcagtcaaggcttcagttttctcaggccggagcgagtgacattcgggaccagtctaggaactggcttcctggaccctgttaccgccagcagcgagtatcaaagacatctgcggataacaacaacagtgaatactcgtggactggagctaccaagtaccacctcaatggcagagactctctggtgaatccgggcccggccatggcaagccacaaggacgatgaagaaaagttttttcctcagagcggggttctcatctttgggaagcaaggctcagagaaaacaaatgtggacattgaaaaggtcatgattacagacgaagaggaaatcaggacaaccaatcccgtggctacggagcagtatggttctgtatctaccaacctccagagaggcaacagacaagcagctaccgcagatgtcaacacacaaggcgttcttccaggcatggtctggcaggacagagatgtgtaccttcaggggcccatctgggcaaagattccacacacggacggacattttcacccctctcccctcatgggtggattcggacttaaacaccctcctccacagattctcatcaagaacaccccggtacctgcgaatccttcgaccaccttcagtgcggcaaagtttgcttccttcatcacacagtactccacgggacaggtcagcgtggagatcgagtgggagctgcagaaggaaaacagcaaacgctggaatcccgaaattcagtacacttccaactacaacaagtctgttaatgtggactttactgtggacactaatggcgtgtattcagagcctcgccccattggcaccagatacctgactcgtaatctgttgcttgttaatcaataaaccgtttaattcgtttcagttgaactttggtctctgcgtatttctttcttatctagtttccatggctacgtagataagtagcatggcgggttaatcattaactacagcccgggcgtttaaacagcgggcggaggggtggagtcgtgacgtgaattacgtcatagggttagggaggtcctgtattagaggtcacgtgagtgttttgcgacattttgcgacaccatgtggtctcgctgggggggggggcccgagtgagcacgcagggtctccattttgaagcgggaggtttgaacgcggccgcaaaaggccttcttggccaccccgggccgtcgaccaattctcatgtttgacagcttatcatcgaatttctgccattcatccgcttattatcacttattcaggcgtagcaaccaggcgtttaagggcaccaataactgccttaaaaaaattacgccccgccctgccactcatcgcagtactgttgtaattcattaagcattctgccgacatggaagccatcacaaacggcatgatgaacctgaatcgccagcggcatcagcaccttgtcgccttgcgtataatatttgcccatggtgaaaacgggggcgaagaagttgtccatattggccacgtttaaatcaaaactggtgaaactcacccagggattggctgagacgaaaaacatattctcaataaaccctttagggaaataggccaggttttcaccgtaacacgccacatcttgcgaatatatgtgtagaaactgccggaaatcgtcgtggtattcactccagagcgatgaaaacgtttcagtttgctcatggaaaacggtgtaacaagggtgaacactatcccatatcaccagctcaccgtctttcattgccatacggaattccggatgagcattcatcaggcgggcaagaatgtgaataaaggccggataaaacttgtgcttatttttctttacggtctttaaaaaggccgtaatatccagctgaacggtctggttataggtacattgagcaactgactgaaatgcctcaaaatgttctttacgatgccattgggatatatcaacggtggtatatccagtgatttttttctccattttagcttccttagctcctgaaaatctcgataactcaaaaaatacgcccggtagtgatcttatttcattatggtgaaagttggaacctcttacgtgccgatcaacgtctcattttcgccaaaagttggcccagggcttcccggtatcaacagggacaccaggatttatttattctgcgaagtgatcttccgtcacaggtatttattcgcgataagctcatggagcggcgtaaccgtcgcacaggaaggacagagaaagcgcggatctgggaagtgacggacagaacggtcaggacctggattggggaggcggttgccgccgctgctgctgacggtgtgacgttctctgttccggtcacaccacatacgttccgccattcctatgcgatgcacatgctgtatgccggtataccgctgaaagttctgcaaagcctgatgggacataagtccatcagttcaacggaagtctacacgaaggtttttgcgctggatgtggctgcccggcaccgggtgcagtttgcgatgccggagtctgatgcggttgcgatgctgaaacaattatcctgagaataaatgccttggcctttatatggaaatgtggaactgagtggatatgctgtttttgtctgttaaacagagaagctggctgttatccactgagaagcgaacgaaacagtcgggaaaatctcccattatcgtagagatccgcattattaatctcaggagcctgtgtagcgtttataggaagtagtgttctgtcatgatgcctgcaagcggtaacgaaaacgatttgaatatgccttcaggaacaatagaaatcttcgtgcggtgttacgttgaagtggagcggattatgtcagcaatggacagaacaacctaatgaacacagaaccatgatgtggtctgtccttttacagccagtagtgctcgccgcagtcgagcgacagggcgaagccctcgagtgagcgaggaagcaccagggaacagcacttatatattctgcttacacacgatgcctgaaaaaacttcccttggggttatccacttatccacggggatatttttataattattttttttatagtttttagatcttcttttttagagcgccttgtaggcctttatccatgctggttctagagaaggtgttgtgacaaattgccctttcagtgtgacaaatcaccctcaaatgacagtcctgtctgtgacaaattgcccttaaccctgtgacaaattgccctcagaagaagctgttttttcacaaagttatccctgcttattgactcttttttatttagtgtgacaatctaaaaacttgtcacacttcacatggatctgtcatggcggaaacagcggttatcaatcacaagaaacgtaaaaatagcccgcgaatcgtccagtcaaacgacctcactgaggcggcatatagtctctcccgggatcaaaaacgtatgctgtatctgttcgttgaccagatcagaaaatctgatggcaccctacaggaacatgacggtatctgcgagatccatgttgctaaatatgctgaaatattcggattgacctctgcggaagccagtaaggatatacggcaggcattgaagagtttcgcggggaaggaagtggttttttatcgccctgaagaggatgccggcgatgaaaaaggctatgaatcttttccttggtttatcaaacgtgcgcacagtccatccagagggctttacagtgtacatatcaacccatatctcattcccttctttatcgggttacagaaccggtttacgcagtttcggcttagtgaaacaaaagaaatcaccaatccgtatgccatgcgtttatacgaatccctgtgtcagtatcgtaagccggatggctcaggcatcgtctctctgaaaatcgactggatcatagagcgttaccagctgcctcaaagttaccagcgtatgcctgacttccgccgccgcttcctgcaggtctgtgttaatgagatcaacagcagaactccaatgcgcctctcatacattgagaaaaagaaaggccgccagacgactcatatcgtattttccttccgcgatatcacttccatgacgacaggatagtctgagggttatctgtcacagatttgagggtggttcgtcacatttgttctgacctactgagggtaatttgtcacagttttgctgtttccttcagcctgcatggattttctcatactttttgaactgtaatttttaaggaagccaaatttgagggcagtttgtcacagttgatttccttctctttcccttcgtcatgtgacctgatacgcgtgctaccttaagagagtcaattcgcccttcccggtcgatatgaacagcttatttacataattcacgttattggtagttataaatgaaattcctaatatcggttatgaagtgaaattgaatttctacttgatctttctctctatttttgtaaaataaaattaagaatatttaaatattcaatgattcatttttgcagaaatcggaggaagaagaatatatgaaaacatttaacatttctcaacaagatccccccatattgttgtataagtgatgaaatactgaatttaaaacttagtttatatgtggtaaaatgttttaatcaagtttaggaggaattaattatgaagtgtaatgaataatgaatgtaacagggttcaattaaaagagggaagcgtatcattaaccctataaactacgtctgccctcattattggagggtgaaatgtgaatacatcctattcacaatcgaatttacgacacaaccaaattttaatttggctttgcattttatctttttttagcgtattaaatgaaatggttttgaacgtctcattacctgatattgcaaatgattttaataaaccaccagcgagtacaaactgggtgaacacagcctttatgttaaccttttccattggaacagctgtatatggaaagctatctgatcaattaggcatcaaaaggttactcctatttggaattataataaattgtttcgggtcggtaattgggtttgttggccattctttcttttccttacttattatggctcgttttattcaaggggctggtgcagctgcatttccagcactcgtaatggttgtagttgcgcgctatattccaaaggaaaataggggtaaagcatttggtcttattggatcgatagtagccatgggagaaggagtcggtccagcgattggtggaatgatagcccattatattcattggtcctatcttctactcattcctatgataacaattatcactgttccgtttcttatgaaattattaaagaaagaagtaaggataaaaggtcattttgatatcaaaggaattatactaatgtctgtaggcattgtattttttatgttgtttacaacatcatatagcatttcttttcttatcgttagcgtgctgtcattcctgatatttgtaaaacatatcaggaaagtaacagatccttttgttgatcccggattagggaaaaatataccttttatgattggagttctttgtgggggaattatatttggaacagtagcagggtttgtctctatggttccttatatgatgaaagatgttcaccagctaagtactgccgaaatcggaagtgtaattattttccctggaacaatgagtgtcattattttcggctacattggtgggatacttgttgatagaagaggtcctttatacgtgttaaacatcggagttacatttctttctgttagctttttaactgcttcctttcttttagaaacaacatcatggttcatgacaattataatcgtatttgttttaggtgggctttcgttcaccaaaacagttatatcaacaattgtttcaagtagcttgaaacagcaggaagctggtgctggaatgagtttgcttaactttaccagctttttatcagagggaacaggtattgcaattgtaggtggtttattatccatacccttacttgatcaaaggttgttacctatggaagttgatcagtcaacttatctgtatagtaatttgttattacttttttcaggaatcattgtcattagttggctggttaccttgaatgtatataaacattctcaaagggatttctaaatcgttaagggatcaactttgggagagagttcaaaattgatcctttttttataacaggaattgggcatcaaataaaacgaaaggctcagtcgaaagactgggcctttcgttttatctgttgtttgtcggtgaacgctctcctgagtaggacaaatccgccgggagcggatttgaacgttgcgaagcaacggcccggagggtggcgggcaggacgcccgccataaactgccaggcatcaaattaagcagaaggccatcctgacggatggcctttttgcgtttctacaaactcttcctgtcgtcatatctacaattctacacagcccagtccagactattcggcactgaaattatgggtgaagtggtcaagacctcactaggcaccttaaaaatagcgcaccctgaagaagatttatttgaggtagcccttgcctacctagcttccaagaaagatatcctaacagcacaagagcggaaagatgttttgttctacatccagaacaacctctgctaaaattcctgaaaaattttgcaaaaagttgttgactttatctacaaggtgtggcataatgtgtggaattgtgagcggataacaattaagctaattctatggtaaaagcattcctgaacccaatatccttatttttagtggacaaggccttgttctcatatggttgcttgagccagtgccttacaaggctcttccgctttggcaggctgttcaaaattatttattagagcaactcaaggaactaggcggagatccaaaagcaaccgatgcagcacgtgtttttcggattgctgggagcgtcaatagtaagaatggagcggaagtaagagcggaatatcggcacgattacagatatgagttaaggcagattcaatttgattaccttccagaactcaatgaggttattaatcccgctccacaaaagaaaaaacgggggcgtaaaaagaaagtagttcagttattcaatacctacaaactccattacgctcgcctattggatatagtgaaattggtggaactacgaaattatgaggtaactggatacagggaaatcatttgctttttataccgttattggttgtgctgttacacgaacgaccctgtagaggctttaaatcaaacacagacacttaatttacagttcactgagcctttacccttaaaagaggttgaaagggctacacggagcgcagaaaaggcgtgggaagcacgaaataacgaagaggctaaccggattgcaatcgaaaaaggatatcccagtgctggatacaatattagcaataaaaagttgattgaatggctagatatcacaccagaagaacagaagcatttacagacgattatagacgctaatgagaaacggagaagaaagcgggaaagggataggatttatcaagaacaaaaacgtcgtgagcggggagatatgacccgacaggagtatattaagcaacaacaggataaaacagatgataaattatttaaattgcaggagttattagaacagaatcccaaaatctcaaaaattaaattagcaaaaatacttggtgtagataaatcgcacttatacagactgctgaaacaactataactggaaaaaattagtgtctcatggttcgtcgcccttatattatgggcgttagcctgcttgctaattggataggtgttattgtcatttcaacgtcggacgttttggtagatgaacgtcggacgttatttgcttcaatagattgttgatgtattaagggttgcagtgaatcgacaagcaaaaagttatgacgttgtgaaaaaattgaatagaaaattggaaattacgtcggacgttctaacttaaaaaccctgttatatcaatgatttaaaaggaaattaacgtcataaaagacctttctgcaacaaaagtttttctggaagagttgaggttattttataggtattatggacttttgtagactttttgtgtactttttgtggactccacactcgctggtatcgtgttattttttaattgagatatgaatatggaaattaaacgttttaggcgttggtttggtgatgacaaaaaaataagagtacccgctcacaacggatactctttcgagaaatgtacgaaacgctataaataaaaaataactagatacatttacattgtatcacgtttcgtacatttctccaataacaaattgattggaggaatgcaaagtgaataatgaaccagtaaaacgtggtaagaagaacagatgggaattaaacctacctataatgacttatgtagtagctgatgattggattgataaactaggacacgaaacgtttactttatggttgaggttccatacttgggtagatagagaagatgaactccgagattatgatcgcatacctagaagttttgagaacatatataaaaagacactaggaatctcaaaaagtaagttttatagattgataaaacctttatgggaatatggattaatagacatcatagaatacgaagaatctaaccgtaattctactaaacctaaaaatataattgtttatgagtatcctttacacgaaatagaaagaaagtataaaccactagaaaaattaagagattgggataaagactataattccgtttctaaagaattaggtaaaacaggtggtagaccaaggaaaaaagatagtgaagaagaacccgaaaagaaacccgaagaagtaactaaaaagaaacgtaaatataagttaaaaagagttatccacaacggtttcaaaaatgaaacggtggagggtttcaaaaatgaaacggtggagggtttcaaaaatgaaacggtgaccgtttcaaaaataaaacccaataattattcaaatatctttaataacttatcaaatatttctactaatgtttcaaataatttattaattgatgatgatgaggaaatcgaaaatgaaccaactggtcgtacaataaataggtcattacttttttcacaagaagatattaaacaggcctatcaatttattaatagattttcagttatacagttacgtgaaaactttagctttgataaacactttgaagaacggttggtatgttatttatggaaagcagggatttctactttttacacgcacgaaatcagtaaaatgataaaaaaaatagcagactatgaaaaatctaaaaaaggtagattaaacccaatacgtgaccgagccttatatatggtaaatggtcttgtaatgaatagagcttcttcccaaagtgaacatgctacttataaactaaaccaatataaaaaacagaaggaacaggaaaaacaacaacaggagcaacaaagatcaagagtaccgttctataattggttggaggaaagagaagaacaaaccgaaggtcaactacccaccacttaaagcctaacggcttttgaagtggggcttgtaaaaagccctagttgactaccccaagtctttcgaggactacgttggaaaggtcatgacacctacaaatgctcctctagttcgtagccactgtcgttgatggttaaaagtcctgatgggtagggacggtgctgtcaacatcacaagcccttccaacatgggggaagaggaagaacactccgagaaaggagggggctgtcgtacacgccttgttcgtgtacgtgatttttaacacttttatctctaatataatctctccttgagttagcagagactaagaataaaacacattaggattttttatctacataaggaggttcaatacatgcctactatttcgtttaagggaaagtcttttgtacaaaatcatcacttgactgtaaaatatcatgaattgatcccagaaccagaaaaaagtctgaccgataaagttagtcttcatgacaatcttatcattcatggggacaatttaaaggcgttgaaagctctactacctacatatgctggtaagatagattgcatctatattgacccaccatacaatactggaactgaaaaatggatttataatgataatgtcaactccccaatgattagggaatggcttggaaaagtggtagacaaagaagacttatcccgacatgataagtggctttgtatgatgatgccgaggttaaaactgttgaaagagttgttgtcagaagacggagtgatatttgtaagcattgactacaatgaaatacaccatcttacgtgccttatgaacgaaatattcggtgaggagaattttcgtgacgctattatcattcgtagaggagtaaaaaatgttcaagcgcaatttgacacaattgattctctttcaaatggttatgagtctattttggtttacactaaacagccatctcgacgatttaataaggtttatgaagatgtagaagaaaagcctggtagttggaataatcattggagaggtacagaccgtaaaactatgagatatgaattatttggggttactccgacagaaggtcaatggagatgggggaaagaacgtagtctccaggctattgaaaactatcaaatgatgttagatgaacttagacaaaaaggcattactaatccaactcaagaggatattgataaatggtatcttgaatatgtagaaaataatggggaagatattgacttgttacgacaaaatgataatggcacgattgagcactttgttccaccgactagcaaaaagttgttaagtaatgcctggtttgacttaaaacccaacggttctagtcaattaaagaagatatttggaaggaaggttttcgataaccctaaatcaattgatttggtaaaaagactaatacaatttgcgactgaaaacaaagaagcgattgtacttgactcatttgcagggagtggcactactgctcatgcagtattatcgcttaacaaacaagatggagggaatcgtcgtttcatccttattgagatggaagaatatgcacatgagattaccgcagaacgcggatctttatcgatttgcatgcaagctaattcggtggaaacgaggtcatcatttccttccgaaaaaacggttgcatttaaatcttacatatgtaatactttcaaagactacatttgtaagatttgatgtttgagtcggctgaaagatcgtacgtaccaattattgtttcgtgattgttcaagccataacactgtagggatagtggaaagagtgcttcatctggttacgatcaatcaaatattcaaacggagggagacgattttgatgaaaccagtaacgttatacgatgtcgcagagtatgccggtgtctcttatcagaccgtttcccgcgtggtgaaccaggccagccacgtttctgcgaaaacgcgggaaaaagtggaagcggcgatggcggagctgaattacattcccaaccgcgtggcacaacaactggcgggcaaacagtcgttgctgattggcgttgccacctccagtctggccctgcacgcgccgtcgcaaattgtcgcggcgattaaatctcgcgccgatcaactgggtgccagcgtggtggtgtcgatggtagaacgaagcggcgtcgaagcctgtaaaacggcggtgcacaatcttctcgcgcaacgcgtcagtgggctgatcattaactatccgctggatgaccaggatgccattgctgtggaagctgcctgcactaatgttccggcgttatttcttgatgtctctgaccagacacccatcaacagtattattttctcccatgaagacggtacgcgactgggcgtggagcatctggtcgcattgggtcaccagcaaatcgcgctgttagcgggcccattaagttctgtctcggcgcgtctgcgtctggctggctggcataaatatctcactcgcaatcaaattcagccgatagcggaacgggaaggcgactggagtgccatgtccggttttcaacaaaccatgcaaatgctgaatgagggcatcgttcccactgcgatgctggttgccaacgatcagatggcgctgggcgcaatgcgcgccattaccgagtccgggctgcgcgttggtgcggatatctcggtagtgggatacgacgataccgaagacagctcatgttatatcccgccgttaaccaccatcaaacaggattttcgcctgctggggcaaaccagcgtggaccgcttgctgcaactctctcagggccaggcggtgaagggcaatcagctgttgcccgtctcactggtgaaaagaaaaaccaccctggcgcccaatacgcaaaccgcctctccccgcgcgttggccgattcattaatgcagctggcacgacaggtttcccgactggaaagcgggcagtgagcgcaacgcaattaatgtgagttaggatcgctaccttaagagagacgcgttatcgggggttagttcgtcatcattgatgagggttgattatcacagtttattactctgaattggctatccgcgtgtgtacctctacctggagtttttcccacggtggatatttcttcttgcgctgagcgtaagagctatctgacagaacagttcttctttgcttcctcgccagttcgctcgctatgctcggttacacggctgcggcgagcgctagtgataataagtgactgaggtatgtgctcttcttatctccttttgtagtgttgctcttattttaaacaactttgcggttttttgatgactttgcgattttgttgttgctttgcagtaaattgcaagatttaataaaaaaacgcaaagcaatgattaaaggatgttcagaatgaaactcatggaaacacttaaccagtgcataaacgctggtcatgaaatgacgaaggctatcgccattgcacagtttaatgatgacagcccggaagcgaggaaaataacccggcgctggagaataggtgaagcagcggatttagttggggtttcttctcaggctatcagagatgccgagaaagcagggcgactaccgcacccggatatggaaattcgaggacgggttgagcaacgtgttggttatacaattgaacaaattaatcatatgcgtgatgtgtttggtacgcgattgcgacgtgctgaagacgtatttccaccggtgatcggggttgctgcccataaaggtggcgtttacaaaacctcagtttctgttcatcttgctcaggatctggctctgaaggggctacgtgttttgctcgtggaaggtaacgacccccagggaacagcctcaatgtatcacggatgggtaccagatcttcatattcatgcagaagacactctcctgcctttctatcttggggaaaaggacgatgtcacttatgcaataaagcccacttgctggccggggcttgacattattccttcctgtctggctctgcaccgtattgaaactgagttaatgggcaaatttgatgaaggtaaactgcccaccgatccacacctgatgctccgactggccattgaaactgttgctcatgactatgatgtcatagttattgacagcgcgcctaacctgggtatcggcacgattaatgtcgtatgtgctgctgatgtgctgattgttcccacgcctgctgagttgtttgactacacctccgcactgcagtttttcgatatgcttcgtgatctgctcaagaacgttgatcttaaagggttcgagcctgatgtacgtattttgcttaccaaatacagcaatagtaatggctctcagtccccgtggatggaggagcaaattcgggatgcctggggaagcatggttctaaaaaatgttgtacgtgaaacggatgaagttggtaaaggtcagatccggatgagaactgtttttgaacaggccattgatcaacgctcttcaactggtgcctggagaaatgctctttctatttgggaacctgtctgcaatgaaattttcgatcgtctgattaaaccacgctgggagattagataatgaagcgtgcgcctgttattccaaaacatacgctcaatactcaaccggttgaagatacttcgttatcgacaccagctgccccgatggtggattcgttaattgcgcgcgtaggagtaatggctcgcggtaatgccattactttgcctgtatgtggtcgggatgtgaagtttactcttgaagtgctccggggtgatagtgttgagaagacctctcgggtatggtcaggtaatgaacgtgaccaggagctgcttactgaggacgcactggatgatctcatcccttcttttctactgactggtcaacagacaccggcgttcggtcgaagagtatctggtgtcatagaaattgccgatgggagtcgccgtcgtaaagctgctgcacttaccgaaagtgattatcgtgttctggttggcgagctggatgatgagcagatggctgcattatccagattgggtaacgattatcgcccaacaagtgcttatgaacgtggtcagcgttatgcaagccgattgcagaatgaatttgctggaaatatttctgcgctggctgatgcggaaaatatttcacgtaagattattacccgctgtatcaacaccgccaaattgcctaaatcagttgttgctcttttttctcaccccggtgaactatctgcccggtcaggtgatgcacttcaaaaagcctttacagataaagaggaattacttaagcagcaggcatctaaccttcatgagcagaaaaaagctggggtgatatttgaagctgaagaagttatcactcttttaacttctgtgcttaaaacgtcatctgcatcaagaactagtttaagctcacgacatcagtttgctcctggagcgacagtattgtataagggcgataaaatggtgcttaacctggacaggtctcgtgttccaactgagtgtatagagaaaattgaggccattcttaaggaacttgaaaagccagcaccctgatgcgaccacgttttagtctacgtttatctgtctttacttaatgtcctttgttacaggccagaaagcataactggcctgaatattctctctgggcccactgttccacttgtatcgtcggtctgataatcagactgggaccacggtcccactcgtatcgtcggtctgattattagtctgggaccacggtcccactcgtatcgtcggtctgattattagtctgggaccacggtcccactcgtatcgtcggtctgataatcagactgggaccacggtcccactcgtatcgtcggtctgattattagtctgggaccatggtcccactcgtatcgtcggtctgattattagtctgggaccacggtcccactcgtatcgtcggtctgattattagtctggaaccacggtcccactcgtatcgtcggtctgattattagtctgggaccacggtcccactcgtatcgtcggtctgattattagtctgggaccacgatcccactcgtgttgtcggtctgattatcggtctgggaccacggtcccacttgtattgtcgatcagactatcagcgtgagactacgattccatcaatgcctgtcaagggcaagtattgacatgtcgtcgtaacctgtagaacggagtaacctcggtgtgcggttgtatgcctgctgtggattgctgctgtgtcctgcttatccacaacattttgcgcacggttatgtggacaaaatacctggttacccaggccgtgccggcacgttaaccgggctgcatccgatgcaagtgtgtcgctgtcgacgagctcgcgagctcggacatgaggttgccccgtattcagtgtcgctgatttgtattgtctgaagttgtttttacgttaagttgatgcagatcaattaatacgatacctgcgtcataattgattatttgacgtggtttgatggcctccacgcacgttgtgatatgtagatgataatcattatcactttacgggtcctttccggtgatccgacaggttacggggcggcgacctcgcgggttttcgctatttatgaaaattttccggtttaaggcgtttccgttcttcttcgtcataacttaatgtttttatttaaaataccctctgaaaagaaaggaaacgacaggtgctgaaagcgagctttttggcctctgtcgtttcctttctctgtttttgtccgtggaatgaacaatggaagtccgagctcatcgctaataacttcgtatagcatacattatacgaagttatattcgatgcggccgcaagcttgaagagctcttctttcagaacgctcggttgccgccgggcgttttttatgagacgtctcggcctgtttggccatta

SEQ ID NO: 4 - DNA, 31145 bp, synthetic construct
  misc_feature 1..31145: note = seed plasmid 4
  source 1..31145: mol_type = other DNA
gcggccgcttggccactccctctatgcgcactcgctcgctcggtggggcctggcgaccaaaggtcgccagacggacgtgctttgcacgtccggccccaccgagcgagcgagtgcgcatagagggagtggccaactccatcactagaggtatggcggccttgatggccaattcgattcgattagggcctacttggcctaatagtaatcaattacggggtcattagttcatagcccatatatggagttccgcgttacataacttacggtaaatggcccgcctggctgaccgcccaacgacccccgcccattgacgtcaataatgacgtatgttcccatagtaacgccaatagggactttccattgacgtcaatgggtggagtatttacggtaaactgcccacttggcagtacatcaagtgtatcatatgccaagtacgccccctattgacgtcaatgacggtaaatggcccgcctggcattatgcccagtacatgaccttatgggactttcctacttggcagtacatctacgtattagtcatcgctattaccatggtgatgcggttttggcagtacatcaatgggcgtggatagcggtttgactcacggggatttccaagtctccaccccattgacgtcaatgggagtttgttttggcaccaaaatcaacgggactttccaaaatgtcgtaacaactccgccccattgacgcaaatgggcggtaggcgtgtacggtgggaggtctatataagcagagctggtttagtgaaccgtcagatgccaccatggtgagcaagggcgaggagctgttcaccggggtggtgcccatcctggtcgagctggacggcgacgtaaacggccacaagttcagcgtgtccggcgagggcgagggcgatgccacctacggcaagctgaccctgaagttcatctgcaccaccggcaagctgcccgtgccctggcccaccctcgtgaccaccctgacctacggcgtgcagtgcttcagccgctaccccgaccacatgaagcagcacgacttcttcaagtccgccatgcccgaaggctacgtccaggagcgcaccatcttcttcaaggacgacggcaactacaagacccgcgccgaggtgaagttcgagggcgacaccctggtgaaccgcatcgagctgaagggcatcgacttcaaggaggacggcaacatcctggggcacaagctggagtacaactacaacagccacaacgtctatatcatggccgacaagcagaagaacggcatcaaggtgaacttcaagatccgccacaacatcgaggacggcagcgtgcagctcgccgaccactaccagcagaacacccccatcggcgacggccccgtgctgctgcccgacaaccactacctgagcacccagtccgccctgagcaaagaccccaacgagaagcgcgatcacatggtcctgctggagttcgtgaccgccgccgggatcactctcggcatggacgagctgtacaagtaagggtggcatccctgtgacccctccccagtgcctctcctggccctggaagttgccactccagtgcccaccagccttgtcctaataaaattaagttgcatcattttgtctgactaggtgtccttctataatattatggggtggaggggggtggtatggagcaaggggcaagttgggaagacaacctgtagggcctgcggggtctattgggaaccaagctggagtgcagtggcacaatcttggctcactgcaatctccgcctcctgggttcaagcgattctcctgcctcagcctcccgagttgttgggattccaggcatgcatgaccaggctcagctaatttttgtttttttggtagagacggggtttcaccatattggccaggctggtctccaactcctaatctcaggtgatctacccaccttggcctcccaaattgctgggattacaggcgtgaaccactgctcccttccctgtccttgccatacctctagtgatggagttggccactccctctatgcgcactcgctcgctcggtggggcctggcgaccaaaggtcgccagacggacgtgctttgcacgtccggccccaccgagcgagcgagtgcgcatagagggagtggccaaggcctgattggccgtagatgtacctggacatccaggtgatgccggcggcggtggtggaggcgcgcggaaagtcgcggacgcggttccagatgttgcgcagcggcaaaaagtgctccatggtcgggacgctctggccggtcaggcgcgcgcaatcgttgacgctctagaccgtgcaaaaggagagcctgtaagcgggcactcttccgtggtctggtggataaattcgcaagggtatcatggcggacgaccggggttcgagccccgtatccggccgtccgccgtgatccatgcggttaccgcccgcgtgtcgaacccaggtgtgcgacgtcagacaacgggggagtgctccttttggcttccttccaggcgcggcggctgctgcgctagcttttttggccactggccgcgcgcagcgtaagcggttaggctggaaagcgaaagcattaagtggctcgctccctgtagccggagggttattttccaagggttgagtcgcgggacccccggttcgagtctcggaccggccggactgcggcgaacgggggtttgcctccccgtcatgcaagaccccgcttgcaaattcctccggaaacagggacgagccccttttttgcttttcccagatgcatccggtgctgcggcagatgcgcccccctcctcagcagcggcaagagcaagagcagcggcagacatgcagggcaccctcccctcctcctaccgcgtggtacccaactccatgctcaacagtccccaggtacagcccaccctgcgtcgcaaccaggaacagctctacagcttcctggagcgccactcgccctacttccgcagccacagtgcgcagattaggagcgccacttctttttgtcacttgaaaaacatgtaaaaataatgtactagagacactttcaataaaggcaaatgcttttatttgtacactctcgggtgattatttacccccacccttgccgtctgcgccgtttaaaaatcaaaggggttctgccgcgcatcgctatgcgccactggcagggacacgttgcgatactggtgtttagtgctccacttaaactcaggcacaaccatccgcggcagctcggtgaagttttcactccacaggctgcgcaccatcaccaacgcgtttagcaggtcgggcgccgatatcttgaagtcgcagttggggcctccgccctgcgcgcgcgagttgcgatacacagggttgcagcactggaacactatcagcgccgggtggtgcacgctggccagcacgctcttgtcggagatcagatccgcgtccaggtcctccgcgttgctcagggcgaacggagtcaactttggtagctgccttcccaaaaagggcgcgtgcccaggctttgagttgcactcgcaccgtagtggcatcaaaaggtgaccgtgcccggtctgggcgttaggatacagcgcctgcataaaagccttgatctgcttaaaagccacctgagcctttgcgccttcagagaagaacatgccgcaagacttgccggaaaactgattggcaggacaggccgcgtcgtgcacgcagcaccttgcgtcggtgttggagatctgcaccacatttcggccccaccggttcttcacgatcttggccttgctagactgctccttcagcgcgcgctgcccgttttcgctcgtcacatccatttcaatcacgtgctccttatttatcataatgcttccgtgtagacacttaagctcgccttcgatctcagcgcagcggtgcagccacaacgcgcagcccgtgggctcgtgatgcttgtaggtcacctctgcaaacgactgcaggtacgcctgcaggaatcgccccatcatcgtcacaaaggtcttgttgctggtgaaggtcagctgcaacccgcggtgctcctcgttcagccaggtcttgcatacggccgccagagcttccacttggtcaggcagtagtttgaagttcgcctttagatcgttatccacgtggtacttgtccatcagcgcgcgcgcagcctccatgcccttctcccacgcagacacgatcggcacactcagcgggttcatcaccgtaatttcactttccgcttcgctgggctcttcctcttcctcttgcgtccgcataccacgcgccactgggtcgtcttcattcagccgccgcactgtgcgcttacctcctttgccatgcttgattagcaccggtgggttgctgaaacccaccatttgtagcgccacatcttctctttcttcctcgctgtccacgattacctctggtgatggcgggcgctcgggcttgggagaagggcgcttctttttcttcttgggcgcaatggccaaatccgccgccgaggtcgatggccgcgggctgggtgtgcgcggcaccagcgcgtcttgtgatgagtcttcctcgtcctcggactcgatacgccgcctcatccgcttttttgggggcgcccggggaggcggcggcgacggggacggggacgacacgtcctccatggttgggggacgtcgcgccgcaccgcgtccgcgctcgggggtggtttcgcgctgctcctcttcccgactggccatttccttctcctataggcagaaaaagatcatggagtcagtcgagaagaaggacagcctaaccgccccctctgagttcgccaccaccgcctccaccgatgccgccaacgcgcctaccaccttccccgtcgaggcacccccgcttgaggaggaggaagtgattatcgagcaggacccaggttttgtaagcgaagacgacgaggaccgctcagtaccaacagaggataaaaagcaagaccaggacaacgcagaggcaaacgaggaacaagtcgggcggggggacgaaaggcatggcgactacctagatgtgggagacgacgtgctgttgaagcatctgcagcgccagtgcgccattatctgcgacgcgttgcaagagcgcagcgatgtgcccctcgccatagcggatgtcagccttgcctacgaacgccacctattctcaccgcgcgtaccccccaaacgccaagaaaacggcacatgcgagcccaacccgcgcctcaacttctaccccgtatttgccgtgccagaggtgcttgccacctatcacatctttttccaaaactgcaagatacccctatcctgccgtgccaaccgcagccgagcggacaagcagctggccttgcggcagggcgctgtcatacctgatatcgcctcgctcaacgaagtgccaaaaatctttgagggtcttggacgcgacgagaagcgcgcggcaaacgctctgcaacaggaaaacagcgaaaatgaaagtcactctggagtgttggtggaactcgagggtgacaacgcgcgcctagccgtactaaaacgcagcatcgaggtcacccactttgcctacccggcacttaacctaccccccaaggtcatgagcacagtcatgagtgagctgatcgtgcgccgtgcgcagcccctggagagggatgcaaatttgcaagaacaaacagaggagggcctacccgcagttggcgacgagcagctagcgcgctggcttcaaacgcgcgagcctgccgacttggaggagcgacgcaaactaatgatggccgcagtgctcgttaccgtggagcttgagtgcatgcagcggttctttgctgacccggagatgcagcgcaagctagaggaaacattgcactacacctttcgacagggctacgtacgccaggcctgcaagatctccaacgtggagctctgcaacctggtctcctaccttggaattttgcacgaaaaccgccttgggcaaaacgtgcttcattccacgctcaagggcgaggcgcgccgcgactacgtccgcgactgcgtttacttatttctatgctacacctggcagacggccatgggcgtttggcagcagtgcttggaggagtgcaacctcaaggagctgcagaaactgctaaagcaaaacttgaaggacctatggacggccttcaacgagcgctccgtggccgcgcacctggcggacatcattttccccgaacgcctgcttaaaaccctgcaacagggtctgccagacttcaccagtcaaagcatgttgcagaactttaggaactttatcctagagcgctcaggaatcttgcccgccacctgctgtgcacttcctagcgactttgtgcccattaagtaccgcgaatgccctccgccgctttggggccactgctaccttctgcagctagccaactaccttgcctaccactctgacataatggaagacgtgagcggtgacggtctactggagtgtcactgtcgctgcaacctatgcaccccgcaccgctccctggtttgcaattcgcagctgcttaacgaaagtcaaattatcggtacctttgagctgcagggtccctcgcctgacgaaaagtccgcggctccggggttgaaactcactccggggctgtggacgtcggcttaccttcgcaaatttgtacctgaggactaccacgcccacgagattaggttctacgaagaccaatcccgcccgccaaatgcggagcttaccgcctgcgtcattacccagggccacattcttggccaattgcaagccatcaacaaagcccgccaagagtttctgctacgaaagggacggggggtttacttggacccccagtccggcgaggagctcaacccaatccccccgccgccgcagccctatcagcagcagccgcgggcccttgcttcccaggatggcacccaaaaagaagctgcagctgccgccgccacccacggacgaggaggaatactgggacagtcaggcagaggaggttttggacgaggaggaggaggacatgatggaagactgggagagcctagacgaggaagcttccgaggtcgaagaggtgtcagacgaaacaccgtcaccctcggtcgcattcccctcgccggcgccccagaaatcggcaaccggttccagcatggctacaacctccgctcctcaggcgccgccggcactgcccgttcgccgacccaaccgtagatgggacaccactggaaccagggccggtaagtccaagcagccgccgccgttagcccaagagcaacaacagcgccaaggctaccgctcatggcgcgggcacaagaacgccatagttgcttgcttgcaagactgtgggggcaacatctccttcgcccgccgctttcttctctaccatcacggcgtggccttcccccgtaacatcctgcattactaccgtcatctctacagcccatactgcaccggcggcagcggcagcggcagcaacagcagcggccacacagaagcaaaggcgaccggatagcaagactctgacaaagcccaagaaatccacagcggcggcagcagcaggaggaggagcgctgcgtctggcgcccaacgaacccgtatcgacccgcgagcttagaaacaggatttttcccactctgtatgctatatttcaacagagcaggggccaagaacaagagctgaaaataaaaaacaggtctctgcgatccctcacccgcagctgcctgtatcacaaaagcgaagatcagcttcggcgcacgctggaagacgcggaggctctcttcagtaaatactgcgcgctgactcttaaggactagtttcgcgccctttctcaaatttaagcgcgaaaactacgtcatctccagcggccacacccggcgccagcacctgtcgtcagcgccattatgagcaaggaaattcccacgccctacatgtggagttaccagccacaaatgggacttgcggctggagctgcccaagactactcaacccgaataaactacatgagcgcgggaccccacatgatatcccgggtcaacggaatccgcgcccaccgaaaccgaattctcttggaacaggcggctattaccaccacacctcgtaataaccttaatccccgtagttggcccgctgccctggtgtaccaggaaagtcccgctcccaccactgtggtacttcccagagacgcccaggccgaagttcagatgactaactcaggggcgcagcttgcgggcggctttcgtcacagggtgcggtcgcccgggcactaaacggtacacaggaaacaggagacacaactccaagtgcatactctatgtcattttcatgggactggtctggccacaactacattaatgaaatatttgccacatcctcttacactttttcatacattgcccaagaataaagaatcgtttgtgttatgtttcaacgtgtttatttttcaattgcagaaaatttcaagtcatttttcattcagtagtatagccccaccaccacatagcttatacagatcaccgtaccttaatcaaactcacagaaccctagtattcaacctgccacctccctcccaacacacagagtacacagtcctttctccccggctggccttaaaaagcatcatatcatgggtaacagacatattcttaggtgttatattccacacggtttcctgtcgagccaaacgctcatcagtgatattaataaactccccgggcagctcacttaagttcatgtcgctgtccagctgctgagccacaggctgctgtccaacttgcggttgcttaacgggcggcgaaggagaagtccacgcctacatgggggtagagtcataatcgtgcatcaggatagggcggtggtgctgcagcagcgcgcgaataaactgctgccgccgccgctccgtcctgcaggaatacaacatggcagtggtctcctcagcgatgattcgcaccgcccgcagcataaggcgccttgtcctccgggcacagcagcgcaccctgatctcacttaaatcagcacagtaactgcagcacagcaccacaatattgttcaaaatcccacagtgcaaggcgctgtatccaaagctcatggcggggaccacagaacccacgtggccatcataccacaagcgcaggtagattaagtggcgacccctcataaacacgctggacataaacattacctcttttggcatgttgtaattcaccacctcccggtaccatataaacctctgattaaacatggcgccatccaccaccatcctaaaccagctggccaaaacctgcccgccggctatacactgcagggaaccgggactggaacaatgacagtggagagcccaggactcgtaaccatggatcatcatgctcgtcatgatatcaatgttggcacaacacaggcacacgtgcatacacttcctcaggattacaagctcctcccgcgttagaaccatatcccagggaacaacccattcctgaatcagcgtaaatcccacactgcagggaagacctcgcacgtaactcacgttgtgcattgtcaaagtgttacattcgggcagcagcggatgatcctccagtatggtagcgcgggtttctgtctcaaaaggaggtagacgatccctactgtacggagtgcgccgagacaaccgagatcgtgttggtcgtagtgtcatgccaaatggaacgccggacgtagtcatatttcctgaagcaaaaccaggtgcgggcgtgacaaacagatctgcgtctccggtctcgccgcttagatcgctctgtgtagtagttgtagtatatccactctctcaaagcatccaggcgccccctggcttcgggttctatgtaaactccttcatgcgccgctgccctgataacatccaccaccgcagaataagccacacccagccaacctacacattcgttctgcgagtcacacacgggaggagcgggaagagctggaagaaccatgtttttttttttattccaaaagattatccaaaacctcaaaatgaagatctattaagtgaacgcgctcccctccggtggcgtggtcaaactctacagccaaagaacagataatggcatttgtaagatgttgcacaatggcttccaaaaggcaaacggccctcacgtccaagtggacgtaaaggctaaacccttcagggtgaatctcctctataaacattccagcaccttcaaccatgcccaaataattctcatctcgccaccttctcaatatatctctaagcaaatcccgaatattaagtccggccattgtaaaaatctgctccagagcgccctccaccttcagcctcaagcagcgaatcatgattgcaaaaattcaggttcctcacagacctgtataagattcaaaagcggaacattaacaaaaataccgcgatcccgtaggtcccttcgcagggccagctgaacataatcgtgcaggtctgcacggaccagcgcggccacttccccgccaggaaccatgacaaaagaacccacactgattatgacacgcatactcggagctatgctaaccagcgtagccccgatgtaagcttgttgcatgggcggcgatataaaatgcaaggtgctgctcaaaaaatcaggcaaagcctcgcgcaaaaaagaaagcacatcgtagtcatgctcatgcagataaaggcaggtaagctccggaaccaccacagaaaaagacaccatttttctctcaaacatgtctgcgggtttctgcataaacacaaaataaaataacaaaaaaacatttaaacattagaagcctgtcttacaacaggaaaaacaacccttataagcataagacggactacggccatgccggcgtgaccgtaaaaaaactggtcaccgtgattaaaaagcaccaccgacagctcctcggtcatgtccggagtcataatgtaagactcggtaaacacatcaggttgattcacatcggtcagtgctaaaaagcgaccgaaatagcccgggggaatacatacccgcaggcgtagagacaacattacagcccccataggaggtataacaaaattaataggagagaaaaacacataaacacctgaaaaaccctcctgcctaggcaaaatagcaccctcccgctccagaacaacatacagcgcttccacagcggcagccataacagtcagccttaccagtaaaaaagaaaacctattaaaaaaacaccactcgacacggcaccagctcaatcagtcacagtgtaaaaaagggccaagtgcagagcgagtatatataggactaaaaaatgacgtaacggttaaagtccacaaaaaacacccagaaaaccgcacgcgaacctacgcccagaaacgaaagccaaaaaacccacaacttcctcaaatcgtcacttccgttttcccacgttacgtaacttcccattttaagaaaactacaattcccaacacatacaagttactccgccctaaaacggcctatgtggccagtgacgtaacgcgaagcgcgcgaagcgagaccacgcctaccagctgcgtcagcagtcaggtgacccttttgcgacagtttgcgacaccacgtggccgctgagggtatatattctcgagtgagcgaaccaggagctccattttgaccgcgaaatttgaacgagcagcagccatgccggggttctacgagattgtcctgaaggtcccgagtgacctggacgagcgcctgccgggcatttctaactcgtttgttaactgggtggccgagaaggaatgggacgtgccgccggattctgacatggatccgaatctgattgagcaggcacccctgaccgtggccgaaaagcttcagcgcgagttcctggtggagtggcgccgcgtgagtaaggctccggaggccctcttttttgtccagttcgaaaagggggagacctacttccacctgcacgtgctgattgagaccatcggggtcaaatccatggtggtcggccgctacgtgagccagattaaagagaagctggtgacccgcatctaccgcggggtcgagccgcagcttccgaactggttcgcggtgaccaaaacgcgaaatggcgccgggggcgggaacaaggtggtggacgactgctacatccccaactacctgctccccaagacccagcccgagctccagtgggcgtggactaacatggaccagtatttaagcgcctgtttgaatctcgcggagcgtaaacggctggtggcgcagcatctgacgcacgtgtcgcagacgcaggagcagaacaaagagaatcagaaccccaattctgacgcgccggtcatcaggtcaaaaacctcagccaggtacatggagctggtcgggtggctggtggaccgcgggatcacgtcagaaaagcaatggattcaggaggaccaggcctcgtacatctccttcaacgccgcctccaactcgcggtcccagatcaaggccgcgctggacaatgcctccaagatcatgagcctgacaaagacggctccggactacctggtgggcagcaacccgccggaggacattaccaaaaatcggatctaccaaatcctggagctgaacgggtacgatccgcagtacgcggcctccgtcttcctgggctgggcgcaaaagaagttcgggaagaggaacaccatctggctctttgggccggccacgacgggtaaaaccaacatcgcggaagccatcgcccacgccgtgcccttctacggctgcgtaaactggaccaatgagaactttcccttcaacgattgcgtcgacaagatggtgatctggtgggaggagggcaagatgacggccaaggtcgtggagagcgccaaggccattctgggcggaagcaaggtgcgcgtggaccaaaagtgcaagtcatcggcccagatcgaacccactcccgtgatcgtcacctccaacaccaacatgtgcgccgtgattgacgggaacagcaccaccttcgagcatcagcagccgctgcaggaccggatgtttgaatttgaacttacccgccgtttggaccatgactttgggaaggtcaccaaacaggaagtaaaggactttttccggtgggcttccgatcacgtgactgacgtggctcatgagttctacgtcagaaagggtggagctaagaaacgccccgcctccaatgacgcggatgtaagcgagccaaaacgggagtgcacgtcacttgcgcagccgacaacgtcagacgcggaagcaccggcggactacgcggacaggtaccaaaacaaatgttctcgtcacgtgggcatgaatctgatgctttttccctgtaaaacatgcgagagaatgaatcaaatttccaatgtctgttttacgcatggtcaaagagactgtggggaatgcttccctggaatgtcagaatctcaacccgtttctgtcgtcaaaaagaagacttatcagaaactgtgtccaattcatcatatcctgggaagggcacccgagattgcctgttcggcctgcgatttggccaatgtggacttggatgactgtgtttctgagcaataaatgacttaaaccaggtggcctctatggccatggctgccgatggttatcttccagattggctcgaggacactctctctgaaggaataagacagtggtggaagctcaaacctggcccaccaccaccaaagcccgcagagcggcataaggacgacagcaggggtcttgtgcttcctgggtacaagtacctcggacccttcaacggactcgacaagggagagccggtcaacgaggcagacgccgcggccctcgagcacgacaaagcctacgaccggcagctcgacagcggagacaacccgtacctcaagtacaaccacgccgacgcggagtttcaggagcgccttaaagaagatacgtcttttgggggcaacctcggacgagcagtcttccaggcgaaaaagagggttcttgaacctctgggcctggttgaggaacctgttaagacggctccgggaaaaaagaggccggtagagcactctcctgtggagccagactcctcctcgggaaccggaaaggcgggccagcagcctgcaagaaaaagattgaattttggtcagactggagacgcagactcagtacctgacccccagcctctcggacagccaccagcagccccctctggtctgggaactaatacgatggctacaggcagtggcgcaccaatggcagacaataacgagggcgccgacggagtgggtaattcctcgggaaattggcattgcgattccacatggatgggcgacagagtcatcaccaccagcacccgaacctgggccctgcccacctacaacaaccacctctacaaacaaatttccagccaatcaggagcctcgaacgacaatcactactttggctacagcaccccttgggggtattttgacttcaacagattccactgccacttttcaccacgtgactggcaaagactcatcaacaacaactggggattccgacccaagagactcaacttcaagctctttaacattcaagtcaaagaggtcacgcagaatgacggtacgacgacgattgccaataaccttaccagcacggttcaggtgtttactgactcggagtaccagctcccgtacgtcctcggctcggcgcatcaaggatgcctcccgccgttcccagcagacgtcttcatggtgccacagtatggatacctcaccctgaacaacgggagtcaggcagtaggacgctcttcattttactgcctggagtactttccttctcagatgctgcgtaccggaaacaactttaccttcagctacacttttgaggacgttcctttccacagcagctacgctcacagccagagtctggaccgtctcatgaatcctctcatcgaccagtacctgtattacttgagcagaacaaacactccaagtggaaccaccacgcagtcaaggcttcagttttctcaggccggagcgagtgacattcgggaccagtctaggaactggcttcctggaccctgttaccgccagcagcgagtatcaaagacatctgcggataacaacaacagtgaatactcgtggactggagctaccaagtaccacctcaatggcagagactctctggtgaatccgggcccggccatggcaagccacaaggacgatgaagaaaagttttttcctcagagcggggttctcatctttgggaagcaaggctcagagaaaacaaatgtggacattgaaaaggtcatgattacagacgaagaggaaatcaggacaaccaatcccgtggctacggagcagtatggttctgtatctaccaacctccagagaggcaacagacaagcagctaccgcagatgtcaacacacaaggcgttcttccaggcatggtctggcaggacagagatgtgtaccttcaggggcccatctgggcaaagattccacacacggacggacattttcacccctctcccctcatgggtggattcggacttaaacaccctcctccacagattctcatcaagaacaccccggtacctgcgaatccttcgaccaccttcagtgcggcaaagtttgcttccttcatcacacagtactccacgggacaggtcagcgtggagatcgagtgggagctgcagaaggaaaacagcaaacgctggaatcccgaaattcagtacacttccaactacaacaagtctgttaatgtggactttactgtggacactaatggcgtgtattcagagcctcgccccattggcaccagatacctgactcgtaatctgttgcttgttaatcaataaaccgtttaattcgtttcagttgaactttggtctctgcgtatttctttcttatctagtttccatggctacgtagataagtagcatggcgggttaatcattaactacagcccgggcgtttaaacagcgggcggaggggtggagtcgtgacgtgaattacgtcatagggttagggaggtcctgtattagaggtcacgtgagtgttttgcgacattttgcgacaccatgtggtctcgctgggggggggggcccgagtgagcacgcagggtctccattttgaagcgggaggtttgaacgcggccgcaaaaggccttcttggccaccccgggccgtcgaccaattctcatgtttgacagcttatcatcgaatttctgccattcatccgcttattatcacttattcaggcgtagcaaccaggcgtttaagggcaccaataactgccttaaaaaaattacgccccgccctgccactcatcgcagtactgttgtaattcattaagcattctgccgacatggaagccatcacaaacggcatgatgaacctgaatcgccagcggcatcagcaccttgtcgccttgcgtataatatttgcccatggtgaaaacgggggcgaagaagttgtccatattggccacgtttaaatcaaaactggtgaaactcacccagggattggctgagacgaaaaacatattctcaataaaccctttagggaaataggccaggttttcaccgtaacacgccacatcttgcgaatatatgtgtagaaactgccggaaatcgtcgtggtattcactccagagcgatgaaaacgtttcagtttgctcatggaaaacggtgtaacaagggtgaacactatcccatatcaccagctcaccgtctttcattgccatacggaattccggatgagcattcatcaggcgggcaagaatgtgaataaaggccggataaaacttgtgcttatttttctttacggtctttaaaaaggccgtaatatccagctgaacggtctggttataggtacattgagcaactgactgaaatgcctcaaaatgttctttacgatgccattgggatatatcaacggtggtatatccagtgatttttttctccattttagcttccttagctcctgaaaatctcgataactcaaaaaatacgcccggtagtgatcttatttcattatggtgaaagttggaacctcttacgtgccgatcaacgtctcattttcgccaaaagttggcccagggcttcccggtatcaacagggacaccaggatttatttattctgcgaagtgatcttccgtcacaggtatttattcgcgataagctcatggagcggcgtaaccgtcgcacaggaaggacagagaaagcgcggatctgggaagtgacggacagaacggtcaggacctggattggggaggcggttgccgccgctgctgctgacggtgtgacgttctctgttccggtcacaccacatacgttccgccattcctatgcgatgcacatgctgtatgccggtataccgctgaaagttctgcaaagcctgatgggacataagtccatcagttcaacggaagtctacacgaaggtttttgcgctggatgtggctgcccggcaccgggtgcagtttgcgatgccggagtctgatgcggttgcgatgctgaaacaattatcctgagaataaatgccttggcctttatatggaaatgtggaactgagtggatatgctgtttttgtctgttaaacagagaagctggctgttatccactgagaagcgaacgaaacagtcgggaaaatctcccattatcgtagagatccgcattattaatctcaggagcctgtgtagcgtttataggaagtagtgttctgtcatgatgcctgcaagcggtaacgaaaacgatttgaatatgccttcaggaacaatagaaatcttcgtgcggtgttacgttgaagtggagcggattatgtcagcaatggacagaacaacctaatgaacacagaaccatgatgtggtctgtccttttacagccagtagtgctcgccgcagtcgagcgacagggcgaagccctcgagtgagcgaggaagcaccagggaacagcacttatatattctgcttacacacgatgcctgaaaaaacttcccttggggttatccacttatccacggggatatttttataattattttttttatagtttttagatcttcttttttagagcgccttgtaggcctttatccatgctggttctagagaaggtgttgtgacaaattgccctttcagtgtgacaaatcaccctcaaatgacagtcctgtctgtgacaaattgcccttaaccctgtgacaaattgccctcagaagaagctgttttttcacaaagttatccctgcttattgactcttttttatttagtgtgacaatctaaaaacttgtcacacttcacatggatctgtcatggcggaaacagcggttatcaatcacaagaaacgtaaaaatagcccgcgaatcgtccagtcaaacgacctcactgaggcggcatatagtctctcccgggatcaaaaacgtatgctgtatctgttcgttgaccagatcagaaaatctgatggcaccctacaggaacatgacggtatctgcgagatccatgttgctaaatatgctgaaatattcggattgacctctgcggaagccagtaaggatatacggcaggcattgaagagtttcgcggggaaggaagtggttttttatcgccctgaagaggatgccggcgatgaaaaaggctatgaatcttttccttggtttatcaaacgtgcgcacagtccatccagagggctttacagtgtacatatcaacccatatctcattcccttctttatcgggttacagaaccggtttacgcagtttcggcttagtgaaacaaaagaaatcaccaatccgtatgccatgcgtttatacgaatccctgtgtcagtatcgtaagccggatggctcaggcatcgtctctctgaaaatcgactggatcatagagcgttaccagctgcctcaaagttaccagcgtatgcctgacttccgccgccgcttcctgcaggtctgtgttaatgagatcaacagcagaactccaatgcgcctctcatacattgagaaaaagaaaggccgccagacgactcatatcgtattttccttccgcgatatcacttccatgacgacaggatagtctgagggttatctgtcacagatttgagggtggttcgtcacatttgttctgacctactgagggtaatttgtcacagttttgctgtttccttcagcctgcatggattttctcatactttttgaactgtaatttttaaggaagccaaatttgagggcagtttgtcacagttgatttccttctctttcccttcgtcatgtgacctgatacgcgtgctaccttaagagagtcaattcgcccttcccggtcgatatgaacagcttatttacataattcacgttattggtagttataaatgaaattcctaatatcggttatgaagtgaaattgaatttctacttgatctttctctctatttttgtaaaataaaattaagaatatttaaatattcaatgattcatttttgcagaaatcggaggaagaagaatatatgaaaacatttaacatttctcaacaagatccccccatattgttgtataagtgatgaaatactgaatttaaaacttagtttatatgtggtaaaatgttttaatcaagtttaggaggaattaattatgaagtgtaatgaataatgaatgtaacagggttcaattaaaagagggaagcgtatcattaaccctataaactacgtctgccctcattattggagggtgaaatgtgaatacatcctattcacaatcgaatttacgacacaaccaaattttaatttggctttgcattttatctttttttagcgtattaaatgaaatggttttgaacgtctcattacctgatattgcaaatgattttaataaaccaccagcgagtacaaactgggtgaacacagcctttatgttaaccttttccattggaacagctgtatatggaaagctatctgatcaattaggcatcaaaaggttactcctatttggaattataataaattgtttcgggtcggtaattgggtttgttggccattctttcttttccttacttattatggctcgttttattcaaggggctggtgcagctgcatttccagcactcgtaatggttgtagttgcgcgctatattccaaaggaaaataggggtaaagcatttggtcttattggatcgatagtagccatgggagaaggagtcggtccagcgattggtggaatgatagcccattatattcattggtcctatcttctactcattcctatgataacaattatcactgttccgtttcttatgaaattattaaagaaagaagtaaggataaaaggtcattttgatatcaaaggaattatactaatgtctgtaggcattgtattttttatgttgtttacaacatcatatagcatttcttttcttatcgttagcgtgctgtcattcctgatatttgtaaaacatatcaggaaagtaacagatccttttgttgatcccggattagggaaaaatataccttttatgattggagttctttgtgggggaattatatttggaacagtagcagggtttgtctctatggttccttatatgatgaaagatgttcaccagctaagtactgccgaaatcggaagtgtaattattttccctggaacaatgagtgtcattattttcggctacattggtgggatacttgttgatagaagaggtcctttatacgtgttaaacatcggagttacatttctttctgttagctttttaactgcttcctttcttttagaaacaacatcatggttcatgacaattataatcgtatttgttttaggtgggctttcgttcaccaaaacagttatatcaacaattgtttcaagtagcttgaaacagcaggaagctggtgctggaatgagtttgcttaactttaccagctttttatcagagggaacaggtattgcaattgtaggtggtttattatccatacccttacttgatcaaaggttgttacctatggaagttgatcagtcaacttatctgtatagtaatttgttattacttttttcaggaatcattgtcattagttggctggttaccttgaatgtatataaacattctcaaagggatttctaaatcgttaagggatcaactttgggagagagttcaaaattgatcctttttttataacaggaattgggcatcaaataaaacgaaaggctcagtcgaaagactgggcctttcgttttatctgttgtttgtcggtgaacgctctcctgagtaggacaaatccgccgggagcggatttgaacgttgcgaagcaacggcccggagggtggcgggcaggacgcccgccataaactgccaggcatcaaattaagcagaaggccatcctgacggatggcctttttgcgtttctacaaactcttcctgtcgtcatatctacaattctacacagcccagtccagactattcggcactgaaattatgggtgaagtggtcaagacctcactaggcaccttaaaaatagcgcaccctgaagaagatttatttgaggtagcccttgcctacctagcttccaagaaagatatcctaacagcacaagagcggaaagatgttttgttctacatccagaacaacctctgctaaaattcctgaaaaattttgcaaaaagttgttgactttatctacaaggtgtggcataatgtgtggaattgtgagcggataacaattaagctaattctatggtaaaagcattcctgaacccaatatccttatttttagtggacaaggccttgttctcatatggttgcttgagccagtgccttacaaggctcttccgctttggcaggctgttcaaaattatttattagagcaactcaaggaactaggcggagatccaaaagcaaccgatgcagcacgtgtttttcggattgctgggagcgtcaatagtaagaatggagcggaagtaagagcggaatatcggcacgattacagatatgagttaaggcagattcaatttgattaccttccagaactcaatgaggttattaatcccgctccacaaaagaaaaaacgggggcgtaaaaagaaagtagttcagttattcaatacctacaaactccattacgctcgcctattggatatagtgaaattggtggaactacgaaattatgaggtaactggatacagggaaatcatttgctttttataccgttattggttgtgctgttacacgaacgaccctgtagaggctttaaatcaaacacagacacttaatttacagttcactgagcctttacccttaaaagaggttgaaagggctacacggagcgcagaaaaggcgtgggaagcacgaaataacgaagaggctaaccggattgcaatcgaaaaaggatatcccagtgctggatacaatattagcaataaaaagttgattgaatggctagatatcacaccagaagaacagaagcatttacagacgattatagacgctaatgagaaacggagaagaaagcgggaaagggataggatttatcaagaacaaaaacgtcgtgagcggggagatatgacccgacaggagtatattaagcaacaacaggataaaacagatgataaattatttaaattgcaggagttattagaacagaatcccaaaatctcaaaaattaaattagcaaaaatacttggtgtagataaatcgcacttatacagactgctgaaacaactataactggaaaaaattagtgtctcatggttcgtcgcccttatattatgggcgttagcctgcttgctaattggataggtgttattgtcatttcaacgtcggacgttttggtagatgaacgtcggacgttatttgcttcaatagattgttgatgtattaagggttgcagtgaatcgacaagcaaaaagttatgacgttgtgaaaaaattgaatagaaaattggaaattacgtcggacgttctaacttaaaaaccctgttatatcaatgatttaaaaggaaattaacgtcataaaagacctttctgcaacaaaagtttttctggaagagttgaggttattttataggtattatggacttttgtagactttttgtgtactttttgtggactccacactcgctggtatcgtgttattttttaattgagatatgaatatggaaattaaacgttttaggcgttggtttggtgatgacaaaaaaataagagtacccgctcacaacggatactctttcgagaaatgtacgaaacgctataaataaaaaataactagatacatttacattgtatcacgtttcgtacatttctccaataacaaattgattggaggaatgcaaagtgaataatgaaccagtaaaacgtggtaagaagaacagatgggaattaaacctacctataatgacttatgtagtagctgatgattggattgataaactaggacacgaaacgtttactttatggttgaggttccatacttgggtagatagagaagatgaactccgagattatgatcgcatacctagaagttttgagaacatatataaaaagacactaggaatctcaaaaagtaagttttatagattgataaaacctttatgggaatatggattaatagacatcatagaatacgaagaatctaaccgtaattctactaaacctaaaaatataattgtttatgagtatcctttacacgaaatagaaagaaagtataaaccactagaaaaattaagagattgggataaagactataattccgtttctaaagaattaggtaaaacaggtggtagaccaaggaaaaaagatagtgaagaagaacccgaaaagaaacccgaagaagtaactaaaaagaaacgtaaatataagttaaaaagagttatccacaacggtttcaaaaatgaaacggtggagggtttcaaaaatgaaacggtggagggtttcaaaaatgaaacggtgaccgtttcaaaaataaaacccaataattattcaaatatctttaataacttatcaaatatttctactaatgtttcaaataatttattaattgatgatgatgaggaaatcgaaaatgaaccaactggtcgtacaataaataggtcattacttttttcacaagaagatattaaacaggcctatcaatttattaatagattttcagttatacagttacgtgaaaactttagctttgataaacactttgaagaacggttggtatgttatttatggaaagcagggatttctactttttacacgcacgaaatcagtaaaatgataaaaaaaatagcagactatgaaaaatctaaaaaaggtagattaaacccaatacgtgaccgagccttatatatggtaaatggtcttgtaatgaatagagcttcttcccaaagtgaacatgctacttataaactaaaccaatataaaaaacagaaggaacaggaaaaacaacaacaggagcaacaaagatcaagagtaccgttctataattggttggaggaaagagaagaacaaaccgaaggtcaactacccaccacttaaagcctaacggcttttgaagtggggcttgtaaaaagccctagttgactaccccaagtctttcgaggactacgttggaaaggtcatgacacctacaaatgctcctctagttcgtagccactgtcgttgatggttaaaagtcctgatgggtagggacggtgctgtcaacatcacaagcccttccaacatgggggaagaggaagaacactccgagaaaggagggggctgtcgtacacgccttgttcgtgtacgtgatttttaacacttttatctctaatataatctctccttgagttagcagagactaagaataaaacacattaggattttttatctacataaggaggttcaatacatgcctactatttcgtttaagggaaagtcttttgtacaaaatcatcacttgactgtaaaatatcatgaattgatcccagaaccagaaaaaagtctgaccgataaagttagtcttcatgacaatcttatcattcatggggacaatttaaaggcgttgaaagctctactacctacatatgctggtaagatagattgcatctatattgacccaccatacaatactggaactgaaaaatggatttataatgataatgtcaactccccaatgattagggaatggcttggaaaagtggtagacaaagaagacttatcccgacatgataagtggctttgtatgatgatgccgaggttaaaactgttgaaagagttgttgtcagaagacggagtgatatttgtaagcattgactacaatgaaatacaccatcttacgtgccttatgaacgaaatattcggtgaggagaattttcgtgacgctattatcattcgtagaggagtaaaaaatgttcaagcgcaatttgacacaattgattctctttcaaatggttatgagtctattttggtttacactaaacagccatctcgacgatttaataaggtttatgaagatgtagaagaaaagcctggtagttggaataatcattggagaggtacagaccgtaaaactatgagatatgaattatttggggttactccgacagaaggtcaatggagatgggggaaagaacgtagtctccaggctattgaaaactatcaaatgatgttagatgaacttagacaaaaaggcattactaatccaactcaagaggatattgataaatggtatcttgaatatgtagaaaataatggggaagatattgacttgttacgacaaaatgataatggcacgattgagcactttgttccaccgactagcaaaaagttgttaagtaatgcctggtttgacttaaaacccaacggttctagtcaattaaagaagatatttggaaggaaggttttcgataaccctaaatcaattgatttggtaaaaagactaatacaatttgcgactgaaaacaaagaagcgattgtacttgactcatttgcagggagtggcactactgctcatgcagtattatcgcttaacaaacaagatggagggaatcgtcgtttcatccttattgagatggaagaatatgcacatgagattaccgcagaacgcggatctttatcgatttgcatgcaagctaattcggtggaaacgaggtcatcatttccttccgaaaaaacggttgcatttaaatcttacatatgtaatactttcaaagactacatttgtaagatttgatgtttgagtcggctgaaagatcgtacgtaccaattattgtttcgtgattgttcaagccataacactgtagggatagtggaaagagtgcttcatctggttacgatcaatcaaatattcaaacggagggagacgattttgatgaaaccagtaacgttatacgatgtcgcagagtatgccggtgtctcttatcagaccgtttcccgcgtggtgaaccaggccagccacgtttctgcgaaaacgcgggaaaaagtggaagcggcgatggcggagctgaattacattcccaaccgcgtggcacaacaactggcgggcaaacagtcgttgctgattggcgttgccacctccagtctggccctgcacgcgccgtcgcaaattgtcgcggcgattaaatctcgcgccgatcaactgggtgccagcgtggtggtgtcgatggtagaacgaagcggcgtcgaagcctgtaaaacggcggtgcacaatcttctcgcgcaacgcgtcagtgggctgatcattaactatccgctggatgaccaggatgccattgctgtggaagctgcctgcactaatgttccggcgttatttcttgatgtctctgaccagacacccatcaacagtattattttctcccatgaagacggtacgcgactgggcgtggagcatctggtcgcattgggtcaccagcaaatcgcgctgttagcgggcccattaagttctgtctcggcgcgtctgcgtctggctggctggcataaatatctcactcgcaatcaaattcagccgatagcggaacgggaaggcgactggagtgccatgtccggttttcaacaaaccatgcaaatgctgaatgagggcatcgttcccactgcgatgctggttgccaacgatcagatggcgctgggcgcaatgcgcgccattaccgagtccgggctgcgcgttggtgcggatatctcggtagtgggatacgacgataccgaagacagctcatgttatatcccgccgttaaccaccatcaaacaggattttcgcctgctggggcaaaccagcgtggaccgcttgctgcaactctctcagggccaggcggtgaagggcaatcagctgttgcccgtctcactggtgaaaagaaaaaccaccctggcgcccaatacgcaaaccgcctctccccgcgcgttggccgattcattaatgcagctggcacgacaggtttcccgactggaaagcgggcagtgagcgcaacgcaattaatgtgagttaggatcgctaccttaagagagacgcgttatcgggggttagttcgtcatcattgatgagggttgattatcacagtttattactctgaattggctatccgcgtgtgtacctctacctggagtttttcccacggtggatatttcttcttgcgctgagcgtaagagctatctgacagaacagttcttctttgcttcctcgccagttcgctcgctatgctcggttacacggctgcggcgagcgctagtgataataagtgactgaggtatgtgctcttcttatctccttttgtagtgttgctcttattttaaacaactttgcggttttttgatgactttgcgattttgttgttgctttgcagtaaattgcaagatttaataaaaaaacgcaaagcaatgattaaaggatgttcagaatgaaactcatggaaacacttaaccagtgcataaacgctggtcatgaaatgacgaaggctatcgccattgcacagtttaatgatgacagcccggaagcgaggaaaataacccggcgctggagaataggtgaagcagcggatttagttggggtttcttctcaggctatcagagatgccgagaaagcagggcgactaccgcacccggatatggaaattcgaggacgggttgagcaacgtgttggttatacaattgaacaaattaatcatatgcgtgatgtgtttggtacgcgattgcgacgtgctgaagacgtatttccaccggtgatcggggttgctgcccataaaggtggcgtttacaaaacctcagtttctgttcatcttgctcaggatctggctctgaaggggctacgtgttttgctcgtggaaggtaacgacccccagggaacagcctcaatgtatcacggatgggtaccagatcttcatattcatgcagaagacactctcctgcctttctatcttggggaaaaggacgatgtcacttatgcaataaagcccacttgctggccggggcttgacattattccttcctgtctggctctgcaccgtattgaaactgagttaatgggcaaatttgatgaaggtaaactgcccaccgatccacacctgatgctccgactggccattgaaactgttgctcatgactatgatgtcatagttattgacagcgcgcctaacctgggtatcggcacgattaatgtcgtatgtgctgctgatgtgctgattgttcccacgcctgctgagttgtttgactacacctccgcactgcagtttttcgatatgcttcgtgatctgctcaagaacgttgatcttaaagggttcgagcctgatgtacgtattttgcttaccaaatacagcaatagtaatggctctcagtccccgtggatggaggagcaaattcgggatgcctggggaagcatggttctaaaaaatgttgtacgtgaaacggatgaagttggtaaaggtcagatccggatgagaactgtttttgaacaggccattgatcaacgctcttcaactggtgcctggagaaatgctctttctatttgggaacctgtctgcaatgaaattttcgatcgtctgattaaaccacgctgggagattagataatgaagcgtgcgcctgttattccaaaacatacgctcaatactcaaccggttgaagatacttcgttatcgacaccagctgccccgatggtggattcgttaattgcgcgcgtaggagtaatggctcgcggtaatgccattactttgcctgtatgtggtcgggatgtgaagtttactcttgaagtgctccggggtgatagtgttgagaagacctctcgggtatggtcaggtaatgaacgtgaccaggagctgcttactgaggacgcactggatgatctcatcccttcttttctactgactggtcaacagacaccggcgttcggtcgaagagtatctggtgtcatagaaattgccgatgggagtcgccgtcgtaaagctgctgcacttaccgaaagtgattatcgtgttctggttggcgagctggatgatgagcagatggctgcattatccagattgggtaacgattatcgcccaacaagtgcttatgaacgtggtcagcgttatgcaagccgattgcagaatgaatttgctggaaatatttctgcgctggctgatgcggaaaatatttcacgtaagattattacccgctgtatcaacaccgccaaattgcctaaatcagttgttgctcttttttctcaccccggtgaactatctgcccggtcaggtgatgcacttcaaaaagcctttacagataaagaggaattacttaagcagcaggcatctaaccttcatgagcagaaaaaagctggggtgatatttgaagctgaagaagttatcactcttttaacttctgtgcttaaaacgtcatctgcatcaagaactagtttaagctcacgacatcagtttgctcctggagcgacagtattgtataagggcgataaaatggtgcttaacctggacaggtctcgtgttccaactgagtgtatagagaaaattgaggccattcttaaggaacttgaaaagccagcaccctgatgcgaccacgttttagtctacgtttatctgtctttacttaatgtcctttgttacaggccagaaagcataactggcctgaatattctctctgggcccactgttccacttgtatcgtcggtctgataatcagactgggaccacggtcccactcgtatcgtcggtctgattattagtctgggaccacggtcccactcgtatcgtcggtctgattattagtctgggaccacggtcccactcgtatcgtcggtctgataatcagactgggaccacggtcccactcgtatcgtcggtctgattattagtctgggaccatggtcccactcgtatcgtcggtctgattattagtctgggaccacggtcccactcgtatcgtcggtctgattattagtctggaaccacggtcccactcgtatcgtcggtctgattattagtctgggaccacggtcccactcgtatcgtcggtctgattattagtctgggaccacgatcccactcgtgttgtcggtctgattatcggtctgggaccacggtcccacttgtattgtcgatcagactatcagcgtgagactacgattccatcaatgcctgtcaagggcaagtattgacatgtcgtcgtaacctgtagaacggagtaacctcggtgtgcggttgtatgcctgctgtggattgctgctgtgtcctgcttatccacaacattttgcgcacggttatgtggacaaaatacctggttacccaggccgtgccggcacgttaaccgggctgcatccgatgcaagtgtgtcgctgtcgacgagctcgcgagctcggacatgaggttgccccgtattcagtgtcgctgatttgtattgtctgaagttgtttttacgttaagttgatgcagatcaattaatacgatacctgcgtcataattgattatttgacgtggtttgatggcctccacgcacgttgtgatatgtagatgataatcattatcactttacgggtcctttccggtgatccgacaggttacggggcggcgacctcgcgggttttcgctatttatgaaaattttccggtttaaggcgtttccgttcttcttcgtcataacttaatgtttttatttaaaataccctctgaaaagaaaggaaacgacaggtgctgaaagcgagctttttggcctctgtcgtttcctttctctgtttttgtccgtggaatgaacaatggaagtccgagctcatcgctaataacttcgtatagcatacattatacgaagttatattcgatgcggccgcaagcttgaagagctcttctttcagaacgctcggttgccgccgggcgttttttatgagacgtctcggcctgtttggccatta

SEQ ID NO: 5 - DNA, 30459 bp, synthetic construct
  misc_feature 1..30459: note = seed plasmid 5
  source 1..30459: mol_type = other DNA
gcggccgcttggccactccctctatgcgcgctcgctcactcactcggccctggagaccaaaggtctccagaggccggcagtctctgccggccggccgagtgagtgagcgagcgcgcatagagggagtggccaactccatcatctggccttgatggccaattcgattcgattagggcctacttggcctaatagtaatcaattacggggtcattagttcatagcccatatatggagttccgcgttacataacttacggtaaatggcccgcctggctgaccgcccaacgacccccgcccattgacgtcaataatgacgtatgttcccatagtaacgccaatagggactttccattgacgtcaatgggtggagtatttacggtaaactgcccacttggcagtacatcaagtgtatcatatgccaagtacgccccctattgacgtcaatgacggtaaatggcccgcctggcattatgcccagtacatgaccttatgggactttcctacttggcagtacatctacgtattagtcatcgctattaccatggtgatgcggttttggcagtacatcaatgggcgtggatagcggtttgactcacggggatttccaagtctccaccccattgacgtcaatgggagtttgttttggcaccaaaatcaacgggactttccaaaatgtcgtaacaactccgccccattgacgcaaatgggcggtaggcgtgtacggtgggaggtctatataagcagagctggtttagtgaaccgtcagatgccaccatggtgagcaagggcgaggagctgttcaccggggtggtgcccatcctggtcgagctggacggcgacgtaaacggccacaagttcagcgtgtccggcgagggcgagggcgatgccacctacggcaagctgaccctgaagttcatctgcaccaccggcaagctgcccgtgccctggcccaccctcgtgaccaccctgacctacggcgtgcagtgcttcagccgctaccccgaccacatgaagcagcacgacttcttcaagtccgccatgcccgaaggctacgtccaggagcgcaccatcttcttcaaggacgacggcaactacaagacccgcgccgaggtgaagttcgagggcgacaccctggtgaaccgcatcgagctgaagggcatcgacttcaaggaggacggcaacatcctggggcacaagctggagtacaactacaacagccacaacgtctatatcatggccgacaagcagaagaacggcatcaaggtgaacttcaagatccgccacaacatcgaggacggcagcgtgcagctcgccgaccactaccagcagaacacccccatcggcgacggccccgtgctgctgcccgacaaccactacctgagcacccagtccgccctgagcaaagaccccaacgagaagcgcgatcacatggtcctgctggagttcgtgaccgccgccgggatcactctcggcatggacgagctgtacaagtaagggtggcatccctgtgacccctccccagtgcctctcctggccctggaagttgccactccagtgcccaccagccttgtcctaataaaattaagttgcatcattttgtctgactaggtgtccttctataatattatggggtggaggggggtggtatggagcaaggggcaagttgggaagacaacctgtagggcctgcggggtctattgggaaccaagctggagtgcagtggcacaatcttggctcactgcaatctccgcctcctgggttcaagcgattctcctgcctcagcctcccgagttgttgggattccaggcatgcatgaccaggctcagctaatttttgtttttttggtagagacggggtttcaccatattggccaggctggtctccaactcctaatctcaggtgatctacccaccttggcctcccaaattgctgggattacaggcgtgaaccactgctcccttccctgtccttagatgatggagttggccacattagctatgcgcgctcgctcactcactcggccctggagaccaaaggtctccagaggccggcagtctctgccggccggccgagtgagtgagcgagcgcgcatagagggagtggccaaggcctgattggccgtagaggtagcgggacatccaggtgatgccggcggcggtggtggaggcgcgcggaaactcgcggacgcggttccagatgttgcgcagcggtaggaaataatccatggtcggcacggtctggccggtaagacgtgcgcagtcattgacgctctagaggcaaaaacgaaagcggttgagcaggctcttcctccgtagcctggcggaacgcaaacgggttaggccgcgcgtgtaccccggttcgagtcccctcgaatcaggctaaagccgcgactaacgtggtattggcactcccgtctcgacccaagcccgatagccgccaggatacggtgaagagcctttttgccggccgagtggggtcgctagatttgaaagcggttaaaaaccccgctgggtagtggctcgcgcccgtagtctggacaagcatcactagggttaagttacagcagaacccggttcgcggacggccgcggcaagcgggacttagttaccccgccaatttaaagacccgcagccagccgacttttccagttacgggagcgagcccccttttttctttttgccagatgcatcccgtcctgcgccaaatgcgtcccacccccccggcgaccaccgcaaccgcggccgtagcaggcgccggcgctgtacaacagcagacagagatggatgaacttgctgacgggggtgcccaatggcatgctacaatcgccacaggtactgcccaccctccggcgcaaccaggagaagctctaccgcttccttgcgcaccactccccctactttcgctcccaccgcgccgccatcgaacacgccaccgcttttgataaaatgaaacaactgcgtgtataactcaaataaacagcacttttattttacatgcactggagtatatgcaagttatttaaaagtcaaaggggttctcgcgctcgtcgttgtgcgccgcgctgggaagggccacgttgcggtactggtacttgggctgccacttaaactcggggatcaccagtttaggaacagcaatctcggggaaggtctcgctccacatgcgccggctcatttgcagggcgcccagcatgtccggggcggaaatcttaaaatcgcagttgggaccggtgctttgcgcgcgcgagttgcggtacacagggttgcagcactggaacaccatcagactggggtactttacgctggccagcacgctcttatcgctaatttgatccttgtccaggtcctcggcgttgctcaggccgaacggggtcatcttacacagctggcggcccaggaagggcacgctgtggggcttgtggttacactcgcagtgcacgggcattagcatcattcccgcaccgcgctgcatattcgggtatagggccttaacaaaggccataatctgcttaaaagcttgctgggccttagctccctcgctaaaaaacaggccgcagcttttcccgctaaactggttatttccgcacccggcatcttgcacgcagcagcgcgcgtcatggctggtcagttgcaccacgcttctcccccagcggttctgggtcactttggccttgctgggttgctccttcaacgcgcgctgaccgttctcgctggtcacatccatctccaccacatggtccttgtggatcattaccgtcccgtgcagacacttaagctggccttccacctcggcacagccgtggtcccacagggcactgccggtgcactcccagtttttgtgcgcgatcccgctgtggctaaagatgtaaccttgcaacaggcgacccatcacggtgctaaagctcttctgggtggtaaaggtcagttgcatcccgcgggcctcctcgttcatccaggtctggcacattttttggaatatctcggtctgctccggcataagcttgtaagcattgcgcaggccgctgtcgacgcggtagcgttccatgagcacgtttatggtatccatgcccttctcccaggacgaaaccaaaggcagactcagggggttgcgcacgttcaaaataccaggggtcgcgggctcgacaatgcgttttccgtccttgccttccttcaacagaaccggcggctggctgaatcccactcccacgatcacggcatcttcctggggcatctcttcgtcggggtttaccttggtcacatgtttggtctttctgggctgcttcttttttggagggctgtccactggaaccacgtcctcctcggaagacccggagcccacccgctgatactttcggcgcttggtgggcagaggaggtagcggcggcgaggggctcctttcctgctccggcggatagcgcgccgacccgtggccccggggcggagtggcctctcggtccataaaccggcgcacgtcctgactgccgccggccattgtttcctaggggaagatggaggagcagccgcgtaagcaggagcaggaggaggagaacttaaccacccacgagcaacccaaaattgagcaggacctgggcttggaagagccggctcgtctagaacccccacacgatgaacaggagaagaccaacgctgggctggagcatggctacctaggaggacaggaggatgtgctgctaaaacacttgcagcgccagtcctttatcctccgggacgctctggccgaccgaagcaaaacccccctcagcgtccaggagctgtgtcgggcctacgagctcaacctcttctcgccgcgcgtgccccccaaacgccagcccaacggcacctgcgagcccaacccgcgtcttaacttctaccccgtctttgcggtccccgaggcccttgccacttatcacatattttttaaaaaccaaaaaatccccgtttcctgccgcgccaaccgcacccgcgccgacgcactcctcgctctggggcccggcgcgcgcatacctgatatcgcttccctggaagaggtgcccaagatctttgaagggcttggtcgggacgagacgcgcgcggcgaacgctctaaaagaaacagcagaggaaaagggttacactagcgccctggtagagttggaaggcgataacgccaggctggccgtgcttaagcgcagcgtcgagcttacccatttcgcctaccctgccgttaacctcccgcccaaggtcatgcgtcgcgtcatggatcagcttatcacgccccacattgaggcccttgatgaaagccaaaagcagcgccctgaggacgcccggcccgtggtcagcgacgaaatgcttgcgcgctggctcggaaaccgcgacccccagtccctggaggagcggcgtaagctcatgctggccgtggtcctggtcaccctcgagttggaatgcatgcgccgcttttttagcgaccccgaaaccctgcgcaaggttgaagagaccctgcactacactttcaggcacggctttgtcaggcaggcctgcaagatctctaacgtggagctaaccaacctggtctcctgcctgggtattttacacgagaaccgcctggggcagaccgtgcttcactcgaccctgaagggcgaggcgcggcgggactacatccgcgactgtgtctttctttttctttgccatacctggcagtcggccatgggcgtgtggcagcagtgtctccaggacgagaacctgaaggagctggacaagcttcttgctaaaaaccttaaaaagttatggacgggctttgacgagcgcaccgtcgcctcggacctggccgagattgtttttcctgaacgcctgaggcagacgcttaaaggcgggctgcccgactttatgagccagagcatgttgcaaaactaccgcacttttattctcgagcgatcgggaatcctgcccgccacctgcaatgccttcccctccgactttgtcccgctgagctaccgccagtgtcccccgccgctgtggagccactgctacctcttgcagctggccaactacatcgcccaccactcagacgtgatcgaggacgtaagcggcgaggggctgcttgagtgccactgccgctgcaacctgtgctccccgcaccgctccctggtctgcaacccccagctcctaagcgagacccaggtcatcggtacctttgagctgcaaggtccggaaaactccaccactccgctgaaacttacgccggggttgtggacttccgcgtacctgcgcaaatttgtaccccaggactaccacgcccacgagataaagttctttgaggaccaattgtgcccacagcacgcggatcttacggcctgcgtcatcacccagggcgcaatcctcgcccaattgcacgccatccaaaaatcccgccaagagtttcttctaaaaaagggtaaaggggtttacctggacccccagacaggcgaagtgcttaacccgggtcttccccagcatgccgaggaagaagcaggagccactagtggaggagatggaagaagaatgggacagccaggcagaggaggacgaatgggaggaggaggaggaggaagaattggaagaggtgcaacaggagcaggcaacagagcagcccgtcgccgcaccatccgcgccggcagcccctccggtcaagcctcctcgtagatgggatcaagtgaagggtgacggtaagcaccagcggcagggctaccgatcatggagggcccacaaagccgcgatcattgcctgcttgcaagactgcggggggaacattgcttttgcccgccgctacctgcttttccaccgcggggtaaacatcccccgcaacgtgttgcattactaccgtcaccttcacagctaacaaaaagcaagtaagaggagtcgccggaagaggaggcctcaggattgcggcggacgagcccttcaccaccagggagctaagaaaccgaatattccccactctttatgccatttttcagcagagtcgaggtcagcagcaagagcttaaagtaaaaaatcggtctctgcgctcgctcacccgcagttgcttgtaccacaaaaacgaagatcagctgcagcgcactcttgaagacgccgaggctttgtttcacaagtactgcgcgctcactcttaaagactaaggcgcgcccacccgaaaaaaaggcgggaattacctcatcgccagcaccatgagcaaggagattcccacgccttacatgtggagctatcagccccagatgggcctagccgcgggcgcctcccaggactactccacccgcatgaactggctcagtgccgggccctcaatgatctcacaggtcaacgggatccgtaaccatcgaaaccagatattgttggagcaggcggcagtcacctccacgcccagggcaaagcttaacccgcgtaattggccctccaccctggtgtaccaggaaattcccgggccaactaccgtactacttccgcgtgacgcactggccgaagtccgcatgactaactcaggtgtccagctggccggcggcgcttcccggtgcccgctccgcccacaataaactacctttaaccaggaaactggatgtgaatactctattacatttgattttagttgggccaaaacttatgtaaatgttgaatttgaaactacctcttttaccttttcctatattgcccaagaataaaggataaataaacgtgtttttcatttaaaaatttcatgtatctttattgatttttacaccagcgcgggtacacattctcccaccaccagcccattttacagtgtaaacaattctctcagcacgggtggccttaaataggggaaagttctcattagtgcgggaactggacttggggtttataatccacacagtttcctggcgagccaaacgggggtcggtgattgagatgaagccgtcctttgaaaaatcatccaagtgggcctcgcagtccaaggtcacagtctggtggaatgagaagaacgcacagactcatactcggaaaacaaaatgggtctgtgcctctccatcagcgcccttaacagtctctgccgccggggctcggtgcggctgctacagatgggatcgggatcgcaagtctctttcactataatccccacagcctttagcattagtcttctggtgcgtcgggcacagcaccgcatcctaatctcgctcatgttttcacagtaagtgcagcacataatgaccatgttattcagcagcccataatttagggtgctccagccaaagcttatgttggaaatgatggaacccacgtgaccatcgtaccaaatgcggcagtatatcaggtgcctgccccttataaacacactgcccatatacataatctctttggacaagtttctatttacaatctgccggtaccaggggaagcgctggttgaacatgcacccgtaaatgactctcctaaaccacacggccagcagggtgcctcccgcccggcactgcagggagcccggggataaacagtggcaatgcaggatccagcgctcgtacccgcttaccatctgggctcttaccagatccagggtagcgggacacaggcacactgacatacatctttttaaaatttttatttcctttcgggtcaggatcatatcccaggggactggaaactcttggagcagggtaaaaccagcagcacatggtaatccacggacagaacttacattatgataatctgcatgatcacaatcgggcaatacagggtgttgttcagtcaaagaggccctggtctccttatcatatcgtggtaaacgggccctgcgatatggataatggcggagcaaggttgattgttccttggtgctcattgtagtgcaccctcttgcgtacctcgttgtacttttgccagcagaaagtggccctggaacagcaaatacctctcctccgaccgtcctttcgctgttgccgctcagtcatccaactgaagtacatccattcccaaaggttgtgaagaagttcctttgtatctaatgaaacaaaaagcccgtccatgcggattcccctcatcacatcagccaggactctgtaggccatccccatccagttaatgctgccttgtctatcatttaaagggggcggtggcaaaattggaagaaccatttttattccaaacggtctcgaaggacgataaagtgcaagtcacgcaggtgacagcgatcaccgccgctgtgttggtggaaacatacagccaggtcaaaacccactctattttcaaggtgctcgactgtggcttcgagcagtggctctacgcgtacatccagcataagaatcacattaaaagccggccctccatcgatttcatcaatcatcatgttacattcctgcaccatccccaggtaattctcatttttccagccttggattatttctacaaattgttggtgtaagtccactccgcacatgtggaaaagctcccatagcgccccctccactttcataatcaggcagaccttcataatagaaacaaatcctgctgctccaccacctgcagcgtgtttaaaacaacaacatttaataaggttctgccctcagcccttagctgacgtctaagtgtcagctgcaaaaagtcacttaagtcctgggccactacagctgacaattcagagccagggctaagcgtgggactggcaagcgtaagggagtactttaatgctccaaagctagcacctaaaaactgcatgctggaataagctctttttgtatctccggtaatgccttccaaaatgtgagtaataaagcgaggtagtttttctttaatcatgttagtaatagaaaaatcctctaaatacgtcactaggaccccagggaccacaatgtggtagcttacaccgcgtcgctgaagcatggttagtagagatgaaagtctgaaaaacaaaaagcatgcgctaaaccaaggtggctatttttactgaaggaaaaattactttttttagcagcagggtgcccactgggtggcccttgcggacatacaaaaattggtccgtgtgattaaaaagcagtacagcaagctcctgtcttctcccggcaaaaatcacatcggactgggttagtatgcccctggcatggtagtcatttaaagccataaatgtgccctgataaccagtaggaacgagtacactgacttttaggtaaaccaataccaccccatgcggaaaaatataaaaagaatcaggacaaaaaaaggtatatttattgctagccccttcctggacgggagccatccctccagggctatctataaaagcatagagacattcagccatagcttagcccgcttaccagtagacaaagagcacagcagtacaagcgccaacagcaataactacttactgttccagctcagtacttaaaggcagcttacactgacgtaatgaccaaaggtgtaaaaaccccgccaaaaaaaaacacacacgccctaggtgtttttcgtaaaaacacttccgcgttctcacttcctcgtatcaattttgtgacttaacttccgggttcccacgttacgtcacttttgcccttacatgtgactgtgccatagggcgccattttcccgtgcccaatatggctaaagtccgcttttttatacgtcatcggccccgcgacttgcttccgggttgggccacgcctttgcggcaggcctatgtggcccagagagggagtggccaactccatcactaggggtagcgcgaagcgcctcccacgctgccgcgtcagcgctgacgtaaattacgtcataggggagtggtcctgtattagctgtcacgtgagtgcttttgcggcattttgcgacaccacgtggccatttgaggtatatatggccgagtgagcgagcaggatctccattttgaccgcgaaatttgaacgagcagcagccatgccgggcttctacgagatcgtgatcaaggtgccgagcgacctggacgagcacctgccgggcatttctgactcgtttgtgaactgggtggccgagaaggaatgggagctgcccccggattctgacatggatcggaatctgatcgagcaggcacccctgaccgtggccgagaagctgcagcgcgacttcctggtccaatggcgccgcgtgagtaaggctccggaggccctcttctttgttcagttcgagaagggcgagagctactttcacctgcacgttctggtcgagaccacgggggtcaagtccatggtgctaggccgcttcctgagtcagattcgggaaaagcttggtccagaccatctacccgcggggtcgagccccaccttgcccaactggttcgcggtgaccaaagacgcggtaatggcgccggcgggggggaacaaggtggtggacgagtgctacatccccaactacctcctgcccaagactcagcccgagctgcagtgggcgtggactaacatggaggagtatataagcgcgtgcttgaacctggccgagcgcaaacggctcgtggcgcagcacctgacccacgtcagccagacgcaggagcagaacaaggagaatctgaaccccaattctgacgcgcccgtgatcaggtcaaaaacctccgcgcgctatatggagctggtcgggtggctggtggaccggggcatcacctccgagaagcagtggatccaggaggaccaggcctcgtacatctccttcaacgccgcctccaactcgcggtcccagatcaaggccgcgctggacaatgccggcaagatcatggcgctgaccaaatccgcgcccgactacctggtggggccctcgctgcccgcggacattacccagaaccgcatctaccgcatcctcgctctcaacggctacgaccctgcctacgccggctccgtctttctcggctgggctcagaaaaagttcgggaaacgcaacaccatctggctgtttggacccgccaccaccggcaagaccaacattgcggaagccatcgcccacgccgtgcccttctacggctgcgtcaactggaccaatgagaactttcccttcaatgattgcgtcgacaagatggtgatctggtgggaggagggcaagatgacggccaaggtcgtggagtccgccaaggccattctcggcggcagcaaggtgcgcgtggaccaaaagtgcaagtcgtccgcccagatcgaccccacccccgtgatcgtcacctccaacaccaacatgtgcgccgtgattgacgggaacagcaccaccttcgagcaccagcagcctctccaggaccggatgtttaagttcgaactcacccgccgtctggagcacgactttggcaaggtgacaaagcaggaagtcaaagagttcttccgctgggccagtgatcacgtgaccgaggtggcgcatgagttttacgtcagaaagggcggagccagcaaaagacccgcccccgatgacgcggataaaagcgagcccaagcgggcctgcccctcagtcgcggatccatcgacgtcagacgcggaaggagctccggtggactttgccgacaggtaccaaaacaaatgttctcgtcacgcgggcatgcttcagatgctgtttccctgcaaaacgtgcgagagaatgaatcagaatttcaacatttgcttcacacacggggtcagagactgctcagagtgtttccccggcgtgtcagaatctcaaccggtcgtcagaaagaggacgtatcggaaactctgtgcgattcatcatctgctggggcgggctcccgagattgcttgctcggcctgcgatctggtcaacgtggacctggatgactgtgtttctgagcaataaatgacttaaaccaggtggcctctatggccatggctgccgatggttatcttccagattggctcgaggacactctctctgaaggaataagacagtggtggaagctcaaacctggcccaccaccaccaaagcccgcagagcggcataaggacgacagcaggggtcttgtgcttcctgggtacaagtacctcggacccttcaacggactcgacaagggagagccggtcaacgaggcagacgccgcggccctcgagcacgacaaagcctacgaccggcagctcgacagcggagacaacccgtacctcaagtacaaccacgccgacgcggagtttcaggagcgccttaaagaagatacgtcttttgggggcaacctcggacgagcagtcttccaggcgaaaaagagggttcttgaacctctgggcctggttgaggaacctgttaagacggctccgggaaaaaagaggccggtagagcactctcctgtggagccagactcctcctcgggaaccggaaaggcgggccagcagcctgcaagaaaaagattgaattttggtcagactggagacgcagactcagtacctgacccccagcctctcggacagccaccagcagccccctctggtctgggaactaatacgatggctacaggcagtggcgcaccaatggcagacaataacgagggcgccgacggagtgggtaattcctcgggaaattggcattgcgattccacatggatgggcgacagagtcatcaccaccagcacccgaacctgggccctgcccacctacaacaaccacctctacaaacaaatttccagccaatcaggagcctcgaacgacaatcactactttggctacagcaccccttgggggtattttgacttcaacagattccactgccacttttcaccacgtgactggcaaagactcatcaacaacaactggggattccgacccaagagactcaacttcaagctctttaacattcaagtcaaagaggtcacgcagaatgacggtacgacgacgattgccaataaccttaccagcacggttcaggtgtttactgactcggagtaccagctcccgtacgtcctcggctcggcgcatcaaggatgcctcccgccgttcccagcagacgtcttcatggtgccacagtatggatacctcaccctgaacaacgggagtcaggcagtaggacgctcttcattttactgcctggagtactttccttctcagatgctgcgtaccggaaacaactttaccttcagctacacttttgaggacgttcctttccacagcagctacgctcacagccagagtctggaccgtctcatgaatcctctcatcgaccagtacctgtattacttgagcagaacaaacactccaagtggaaccaccacgcagtcaaggcttcagttttctcaggccggagcgagtgacattcgggaccagtctaggaactggcttcctggaccctgttaccgccagcagcgagtatcaaagacatctgcggataacaacaacagtgaatactcgtggactggagctaccaagtaccacctcaatggcagagactctctggtgaatccgggcccggccatggcaagccacaaggacgatgaagaaaagttttttcctcagagcggggttctcatctttgggaagcaaggctcagagaaaacaaatgtggacattgaaaaggtcatgattacagacgaagaggaaatcaggacaaccaatcccgtggctacggagcagtatggttctgtatctaccaacctccagagaggcaacagacaagcagctaccgcagatgtcaacacacaaggcgttcttccaggcatggtctggcaggacagagatgtgtaccttcaggggcccatctgggcaaagattccacacacggacggacattttcacccctctcccctcatgggtggattcggacttaaacaccctcctccacagattctcatcaagaacaccccggtacctgcgaatccttcgaccaccttcagtgcggcaaagtttgcttccttcatcacacagtactccacgggacaggtcagcgtggagatcgagtgggagctgcagaaggaaaacagcaaacgctggaatcccgaaattcagtacacttccaactacaacaagtctgttaatgtggactttactgtggacactaatggcgtgtattcagagcctcgccccattggcaccagatacctgactcgtaatctgttgcttgttaatcaataaaccgtttaattcgtttcagttgaactttggtctctgcgtatttctttcttatctagtttccatggctacgtagataagtagcatggcgggttaatcattaactacagcccgggcgtttaaacagcgggcggaggggtggagtcgtgacgtgaattacgtcatagggttagggaggtcctgtattagaggtcacgtgagtgttttgcgacattttgcgacaccatgtggtctcgctgggggggggggcccgagtgagcacgcagggtctccattttgaagcgggaggtttgaacgcggccgcaaaaggccttcttggccaccccgggccgtcgaccaattctcatgtttgacagcttatcatcgaatttctgccattcatccgcttattatcacttattcaggcgtagcaaccaggcgtttaagggcaccaataactgccttaaaaaaattacgccccgccctgccactcatcgcagtactgttgtaattcattaagcattctgccgacatggaagccatcacaaacggcatgatgaacctgaatcgccagcggcatcagcaccttgtcgccttgcgtataatatttgcccatggtgaaaacgggggcgaagaagttgtccatattggccacgtttaaatcaaaactggtgaaactcacccagggattggctgagacgaaaaacatattctcaataaaccctttagggaaataggccaggttttcaccgtaacacgccacatcttgcgaatatatgtgtagaaactgccggaaatcgtcgtggtattcactccagagcgatgaaaacgtttcagtttgctcatggaaaacggtgtaacaagggtgaacactatcccatatcaccagctcaccgtctttcattgccatacggaattccggatgagcattcatcaggcgggcaagaatgtgaataaaggccggataaaacttgtgcttatttttctttacggtctttaaaaaggccgtaatatccagctgaacggtctggttataggtacattgagcaactgactgaaatgcctcaaaatgttctttacgatgccattgggatatatcaacggtggtatatccagtgatttttttctccattttagcttccttagctcctgaaaatctcgataactcaaaaaatacgcccggtagtgatcttatttcattatggtgaaagttggaacctcttacgtgccgatcaacgtctcattttcgccaaaagttggcccagggcttcccggtatcaacagggacaccaggatttatttattctgcgaagtgatcttccgtcacaggtatttattcgcgataagctcatggagcggcgtaaccgtcgcacaggaaggacagagaaagcgcggatctgggaagtgacggacagaacggtcaggacctggattggggaggcggttgccgccgctgctgctgacggtgtgacgttctctgttccggtcacaccacatacgttccgccattcctatgcgatgcacatgctgtatgccggtataccgctgaaagttctgcaaagcctgatgggacataagtccatcagttcaacggaagtctacacgaaggtttttgcgctggatgtggctgcccggcaccgggtgcagtttgcgatgccggagtctgatgcggttgcgatgctgaaacaattatcctgagaataaatgccttggcctttatatggaaatgtggaactgagtggatatgctgtttttgtctgttaaacagagaagctggctgttatccactgagaagcgaacgaaacagtcgggaaaatctcccattatcgtagagatccgcattattaatctcaggagcctgtgtagcgtttataggaagtagtgttctgtcatgatgcctgcaagcggtaacgaaaacgatttgaatatgccttcaggaacaatagaaatcttcgtgcggtgttacgttgaagtggagcggattatgtcagcaatggacagaacaacctaatgaacacagaaccatgatgtggtctgtccttttacagccagtagtgctcgccgcagtcgagcgacagggcgaagccctcgagtgagcgaggaagcaccagggaacagcacttatatattctgcttacacacgatgcctgaaaaaacttcccttggggttatccacttatccacggggatatttttataattattttttttatagtttttagatcttcttttttagagcgccttgtaggcctttatccatgctggttctagagaaggtgttgtgacaaattgccctttcagtgtgacaaatcaccctcaaatgacagtcctgtctgtgacaaattgcccttaaccctgtgacaaattgccctcagaagaagctgttttttcacaaagttatccctgcttattgactcttttttatttagtgtgacaatctaaaaacttgtcacacttcacatggatctgtcatggcggaaacagcggttatcaatcacaagaaacgtaaaaatagcccgcgaatcgtccagtcaaacgacctcactgaggcggcatatagtctctcccgggatcaaaaacgtatgctgtatctgttcgttgaccagatcagaaaatctgatggcaccctacaggaacatgacggtatctgcgagatccatgttgctaaatatgctgaaatattcggattgacctctgcggaagccagtaaggatatacggcaggcattgaagagtttcgcggggaaggaagtggttttttatcgccctgaagaggatgccggcgatgaaaaaggctatgaatcttttccttggtttatcaaacgtgcgcacagtccatccagagggctttacagtgtacatatcaacccatatctcattcccttctttatcgggttacagaaccggtttacgcagtttcggcttagtgaaacaaaagaaatcaccaatccgtatgccatgcgtttatacgaatccctgtgtcagtatcgtaagccggatggctcaggcatcgtctctctgaaaatcgactggatcatagagcgttaccagctgcctcaaagttaccagcgtatgcctgacttccgccgccgcttcctgcaggtctgtgttaatgagatcaacagcagaactccaatgcgcctctcatacattgagaaaaagaaaggccgccagacgactcatatcgtattttccttccgcgatatcacttccatgacgacaggatagtctgagggttatctgtcacagatttgagggtggttcgtcacatttgttctgacctactgagggtaatttgtcacagttttgctgtttccttcagcctgcatggattttctcatactttttgaactgtaatttttaaggaagccaaatttgagggcagtttgtcacagttgatttccttctctttcccttcgtcatgtgacctgatacgcgtgctaccttaagagagtcaattcgcccttcccggtcgatatgaacagcttatttacataattcacgttattggtagttataaatgaaattcctaatatcggttatgaagtgaaattgaatttctacttgatctttctctctatttttgtaaaataaaattaagaatatttaaatattcaatgattcatttttgcagaaatcggaggaagaagaatatatgaaaacatttaacatttctcaacaagatccccccatattgttgtataagtgatgaaatactgaatttaaaacttagtttatatgtggtaaaatgttttaatcaagtttaggaggaattaattatgaagtgtaatgaataatgaatgtaacagggttcaattaaaagagggaagcgtatcattaaccctataaactacgtctgccctcattattggagggtgaaatgtgaatacatcctattcacaatcgaatttacgacacaaccaaattttaatttggctttgcattttatctttttttagcgtattaaatgaaatggttttgaacgtctcattacctgatattgcaaatgattttaataaaccaccagcgagtacaaactgggtgaacacagcctttatgttaaccttttccattggaacagctgtatatggaaagctatctgatcaattaggcatcaaaaggttactcctatttggaattataataaattgtttcgggtcggtaattgggtttgttggccattctttcttttccttacttattatggctcgttttattcaaggggctggtgcagctgcatttccagcactcgtaatggttgtagttgcgcgctatattccaaaggaaaataggggtaaagcatttggtcttattggatcgatagtagccatgggagaaggagtcggtccagcgattggtggaatgatagcccattatattcattggtcctatcttctactcattcctatgataacaattatcactgttccgtttcttatgaaattattaaagaaagaagtaaggataaaaggtcattttgatatcaaaggaattatactaatgtctgtaggcattgtattttttatgttgtttacaacatcatatagcatttcttttcttatcgttagcgtgctgtcattcctgatatttgtaaaacatatcaggaaagtaacagatccttttgttgatcccggattagggaaaaatataccttttatgattggagttctttgtgggggaattatatttggaacagtagcagggtttgtctctatggttccttatatgatgaaagatgttcaccagctaagtactgccgaaatcggaagtgtaattattttccctggaacaatgagtgtcattattttcggctacattggtgggatacttgttgatagaagaggtcctttatacgtgttaaacatcggagttacatttctttctgttagctttttaactgcttcctttcttttagaaacaacatcatggttcatgacaattataatcgtatttgttttaggtgggctttcgttcaccaaaacagttatatcaacaattgtttcaagtagcttgaaacagcaggaagctggtgctggaatgagtttgcttaactttaccagctttttatcagagggaacaggtattgcaattgtaggtggtttattatccatacccttacttgatcaaaggttgttacctatggaagttgatcagtcaacttatctgtatagtaatttgttattacttttttcaggaatcattgtcattagttggctggttaccttgaatgtatataaacattctcaaagggatttctaaatcgttaagggatcaactttgggagagagttcaaaattgatcctttttttataacaggaattgggcatcaaataaaacgaaaggctcagtcgaaagactgggcctttcgttttatctgttgtttgtcggtgaacgctctcctgagtaggacaaatccgccgggagcggatttgaacgttgcgaagcaacggcccggagggtggcgggcaggacgcccgccataaactgccaggcatcaaattaagcagaaggccatcctgacggatggcctttttgcgtttctacaaactcttcctgtcgtcatatctacaattctacacagcccagtccagactattcggcactgaaattatgggtgaagtggtcaagacctcactaggcaccttaaaaatagcgcaccctgaagaagatttatttgaggtagcccttgcctacctagcttccaagaaagatatcctaacagcacaagagcggaaagatgttttgttctacatccagaacaacctctgctaaaattcctgaaaaattttgcaaaaagttgttgactttatctacaaggtgtggcataatgtgtggaattgtgagcggataacaattaagctaattctatggtaaaagcattcctgaacccaatatccttatttttagtggacaaggccttgttctcatatggttgcttgagccagtgccttacaaggctcttccgctttggcaggctgttcaaaattatttattagagcaactcaaggaactaggcggagatccaaaagcaaccgatgcagcacgtgtttttcggattgctgggagcgtcaatagtaagaatggagcggaagtaagagcggaatatcggcacgattacagatatgagttaaggcagattcaatttgattaccttccagaactcaatgaggttattaatcccgctccacaaaagaaaaaacgggggcgtaaaaagaaagtagttcagttattcaatacctacaaactccattacgctcgcctattggatatagtgaaattggtggaactacgaaattatgaggtaactggatacagggaaatcatttgctttttataccgttattggttgtgctgttacacgaacgaccctgtagaggctttaaatcaaacacagacacttaatttacagttcactgagcctttacccttaaaagaggttgaaagggctacacggagcgcagaaaaggcgtgggaagcacgaaataacgaagaggctaaccggattgcaatcgaaaaaggatatcccagtgctggatacaatattagcaataaaaagttgattgaatggctagatatcacaccagaagaacagaagcatttacagacgattatagacgctaatgagaaacggagaagaaagcgggaaagggataggatttatcaagaacaaaaacgtcgtgagcggggagatatgacccgacaggagtatattaagcaacaacaggataaaacagatgataaattatttaaattgcaggagttattagaacagaatcccaaaatctcaaaaattaaattagcaaaaatacttggtgtagataaatcgcacttatacagactgctgaaacaactataactggaaaaaattagtgtctcatggttcgtcgcccttatattatgggcgttagcctgcttgctaattggataggtgttattgtcatttcaacgtcggacgttttggtagatgaacgtcggacgttatttgcttcaatagattgttgatgtattaagggttgcagtgaatcgacaagcaaaaagttatgacgttgtgaaaaaattgaatagaaaattggaaattacgtcggacgttctaacttaaaaaccctgttatatcaatgatttaaaaggaaattaacgtcataaaagacctttctgcaacaaaagtttttctggaagagttgaggttattttataggtattatggacttttgtagactttttgtgtactttttgtggactccacactcgctggtatcgtgttattttttaattgagatatgaatatggaaattaaacgttttaggcgttggtttggtgatgacaaaaaaataagagtacccgctcacaacggatactctttcgagaaatgtacgaaacgctataaataaaaaataactagatacatttacattgtatcacgtttcgtacatttctccaataacaaattgattggaggaatgcaaagtgaataatgaaccagtaaaacgtggtaagaagaacagatgggaattaaacctacctataatgacttatgtagtagctgatgattggattgataaactaggacacgaaacgtttactttatggttgaggttccatacttgggtagatagagaagatgaactccgagattatgatcgcatacctagaagttttgagaacatatataaaaagacactaggaatctcaaaaagtaagttttatagattgataaaacctttatgggaatatggattaatagacatcatagaatacgaagaatctaaccgtaattctactaaacctaaaaatataattgtttatgagtatcctttacacgaaatagaaagaaagtataaaccactagaaaaattaagagattgggataaagactataattccgtttctaaagaattaggtaaaacaggtggtagaccaaggaaaaaagatagtgaagaagaacccgaaaagaaacccgaagaagtaactaaaaagaaacgtaaatataagttaaaaagagttatccacaacggtttcaaaaatgaaacggtggagggtttcaaaaatgaaacggtggagggtttcaaaaatgaaacggtgaccgtttcaaaaataaaacccaataattattcaaatatctttaataacttatcaaatatttctactaatgtttcaaataatttattaattgatgatgatgaggaaatcgaaaatgaaccaactggtcgtacaataaataggtcattacttttttcacaagaagatattaaacaggcctatcaatttattaatagattttcagttatacagttacgtgaaaactttagctttgataaacactttgaagaacggttggtatgttatttatggaaagcagggatttctactttttacacgcacgaaatcagtaaaatgataaaaaaaatagcagactatgaaaaatctaaaaaaggtagattaaacccaatacgtgaccgagccttatatatggtaaatggtcttgtaatgaatagagcttcttcccaaagtgaacatgctacttataaactaaaccaatataaaaaacagaaggaacaggaaaaacaacaacaggagcaacaaagatcaagagtaccgttctataattggttggaggaaagagaagaacaaaccgaaggtcaactacccaccacttaaagcctaacggcttttgaagtggggcttgtaaaaagccctagttgactaccccaagtctttcgaggactacgttggaaaggtcatgacacctacaaatgctcctctagttcgtagccactgtcgttgatggttaaaagtcctgatgggtagggacggtgctgtcaacatcacaagcccttccaacatgggggaagaggaagaacactccgagaaaggagggggctgtcgtacacgccttgttcgtgtacgtgatttttaacacttttatctctaatataatctctccttgagttagcagagactaagaataaaacacattaggattttttatctacataaggaggttcaatacatgcctactatttcgtttaagggaaagtcttttgtacaaaatcatcacttgactgtaaaatatcatgaattgatcccagaaccagaaaaaagtctgaccgataaagttagtcttcatgacaatcttatcattcatggggacaatttaaaggcgttgaaagctctactacctacatatgctggtaagatagattgcatctatattgacccaccatacaatactggaactgaaaaatggatttataatgataatgtcaactccccaatgattagggaatggcttggaaaagtggtagacaaagaagacttatcccgacatgataagtggctttgtatgatgatgccgaggttaaaactgttgaaagagttgttgtcagaagacggagtgatatttgtaagcattgactacaatgaaatacaccatcttacgtgccttatgaacgaaatattcggtgaggagaattttcgtgacgctattatcattcgtagaggagtaaaaaatgttcaagcgcaatttgacacaattgattctctttcaaatggttatgagtctattttggtttacactaaacagccatctcgacgatttaataaggtttatgaagatgtagaagaaaagcctggtagttggaataatcattggagaggtacagaccgtaaaactatgagatatgaattatttggggttactccgacagaaggtcaatggagatgggggaaagaacgtagtctccaggctattgaaaactatcaaatgatgttagatgaacttagacaaaaaggcattactaatccaactcaagaggatattgataaatggtatcttgaatatgtagaaaataatggggaagatattgacttgttacgacaaaatgataatggcacgattgagcactttgttccaccgactagcaaaaagttgttaagtaatgcctggtttgacttaaaacccaacggttctagtcaattaaagaagatatttggaaggaaggttttcgataaccctaaatcaattgatttggtaaaaagactaatacaatttgcgactgaaaacaaagaagcgattgtacttgactcatttgcagggagtggcactactgctcatgcagtattatcgcttaacaaacaagatggagggaatcgtcgtttcatccttattgagatggaagaatatgcacatgagattaccgcagaacgcggatctttatcgatttgcatgcaagctaattcggtggaaacgaggtcatcatttccttccgaaaaaacggttgcatttaaatcttacatatgtaatactttcaaagactacatttgtaagatttgatgtttgagtcggctgaaagatcgtacgtaccaattattgtttcgtgattgttcaagccataacactgtagggatagtggaaagagtgcttcatctggttacgatcaatcaaatattcaaacggagggagacgattttgatgaaaccagtaacgttatacgatgtcgcagagtatgccggtgtctcttatcagaccgtttcccgcgtggtgaaccaggccagccacgtttctgcgaaaacgcgggaaaaagtggaagcggcgatggcggagctgaattacattcccaaccgcgtggcacaacaactggcgggcaaacagtcgttgctgattggcgttgccacctccagtctggccctgcacgcgccgtcgcaaattgtcgcggcgattaaatctcgcgccgatcaactgggtgccagcgtggtggtgtcgatggtagaacgaagcggcgtcgaagcctgtaaaacggcggtgcacaatcttctcgcgcaacgcgtcagtgggctgatcattaactatccgctggatgaccaggatgccattgctgtggaagctgcctgcactaatgttccggcgttatttcttgatgtctctgaccagacacccatcaacagtattattttctcccatgaagacggtacgcgactgggcgtggagcatctggtcgcattgggtcaccagcaaatcgcgctgttagcgggcccattaagttctgtctcggcgcgtctgcgtctggctggctggcataaatatctcactcgcaatcaaattcagccgatagcggaacgggaaggcgactggagtgccatgtccggttttcaacaaaccatgcaaatgctgaatgagggcatcgttcccactgcgatgctggttgccaacgatcagatggcgctgggcgcaatgcgcgccattaccgagtccgggctgcgcgttggtgcggatatctcggtagtgggatacgacgataccgaagacagctcatgttatatcccgccgttaaccaccatcaaacaggattttcgcctgctggggcaaaccagcgtggaccgcttgctgcaactctctcagggccaggcggtgaagggcaatcagctgttgcccgtctcactggtgaaaagaaaaaccaccctggcgcccaatacgcaaaccgcctctccccgcgcgttggccgattcattaatgcagctggcacgacaggtttcccgactggaaagcgggcagtgagcgcaacgcaattaatgtgagttaggatcgctaccttaagagagacgcgttatcgggggttagttcgtcatcattgatgagggttgattatcacagtttattactctgaattggctatccgcgtgtgtacctctacctggagtttttcccacggtggatatttcttcttgcgctgagcgtaagagctatctgacagaacagttcttctttgcttcctcgccagttcgctcgctatgctcggttacacggctgcggcgagcgctagtgataataagtgactgaggtatgtgctcttcttatctccttttgtagtgttgctcttattttaaacaactttgcggttttttgatgactttgcgattttgttgttgctttgcagtaaattgcaagatttaataaaaaaacgcaaagcaatgattaaaggatgttcagaatgaaactcatggaaacacttaaccagtgcataaacgctggtcatgaaatgacgaaggctatcgccattgcacagtttaatgatgacagcccggaagcgaggaaaataacccggcgctggagaataggtgaagcagcggatttagttggggtttcttctcaggctatcagagatgccgagaaagcagggcgactaccgcacccggatatggaaattcgaggacgggttgagcaacgtgttggttatacaattgaacaaattaatcatatgcgtgatgtgtttggtacgcgattgcgacgtgctgaagacgtatttccaccggtgatcggggttgctgcccataaaggtggcgtttacaaaacctcagtttctgttcatcttgctcaggatctggctctgaaggggctacgtgttttgctcgtggaaggtaacgacccccagggaacagcctcaatgtatcacggatgggtaccagatcttcatattcatgcagaagacactctcctgcctttctatcttggggaaaaggacgatgtcacttatgcaataaagcccacttgctggccggggcttgacattattccttcctgtctggctctgcaccgtattgaaactgagttaatgggcaaatttgatgaaggtaaactgcccaccgatccacacctgatgctccgactggccattgaaactgttgctcatgactatgatgtcatagttattgacagcgcgcctaacctgggtatcggcacgattaatgtcgtatgtgctgctgatgtgctgattgttcccacgcctgctgagttgtttgactacacctccgcactgcagtttttcgatatgcttcgtgatctgctcaagaacgttgatcttaaagggttcgagcctgatgtacgtattttgcttaccaaatacagcaatagtaatggctctcagtccccgtggatggaggagcaaattcgggatgcctggggaagcatggttctaaaaaatgttgtacgtgaaacggatgaagttggtaaaggtcagatccggatgagaactgtttttgaacaggccattgatcaacgctcttcaactggtgcctggagaaatgctctttctatttgggaacctgtctgcaatgaaattttcgatcgtctgattaaaccacgctgggagattagataatgaagcgtgcgcctgttattccaaaacatacgctcaatactcaaccggttgaagatacttcgttatcgacaccagctgccccgatggtggattcgttaattgcgcgcgtaggagtaatggctcgcggtaatgccattactttgcctgtatgtggtcgggatgtgaagtttactcttgaagtgctccggggtgatagtgttgagaagacctctcgggtatggtcaggtaatgaacgtgaccaggagctgcttactgaggacgcactggatgatctcatcccttcttttctactgactggtcaacagacaccggcgttcggtcgaagagtatctggtgtcatagaaattgccgatgggagtcgccgtcgtaaagctgctgcacttaccgaaagtgattatcgtgttctggttggcgagctggatgatgagcagatggctgcattatccagattgggtaacgattatcgcccaacaagtgcttatgaacgtggtcagcgttatgcaagccgattgcagaatgaatttgctggaaatatttctgcgctggctgatgcggaaaatatttcacgtaagattattacccgctgtatcaacaccgccaaattgcctaaatcagttgttgctcttttttctcaccccggtgaactatctgcccggtcaggtgatgcacttcaaaaagcctttacagataaagaggaattacttaagcagcaggcatctaaccttcatgagcagaaaaaagctggggtgatatttgaagctgaagaagttatcactcttttaacttctgtgcttaaaacgtcatctgcatcaagaactagtttaagctcacgacatcagtttgctcctggagcgacagtattgtataagggcgataaaatggtgcttaacctggacaggtctcgtgttccaactgagtgtatagagaaaattgaggccattcttaaggaacttgaaaagccagcaccctgatgcgaccacgttttagtctacgtttatctgtctttacttaatgtcctttgttacaggccagaaagcataactggcctgaatattctctctgggcccactgttccacttgtatcgtcggtctgataatcagactgggaccacggtcccactcgtatcgtcggtctgattattagtctgggaccacggtcccactcgtatcgtcggtctgattattagtctgggaccacggtcccactcgtatcgtcggtctgataatcagactgggaccacggtcccactcgtatcgtcggtctgattattagtctgggaccatggtcccactcgtatcgtcggtctgattattagtctgggaccacggtcccactcgtatcgtcggtctgattattagtctggaaccacggtcccactcgtatcgtcggtctgattattagtctgggaccacggtcccactcgtatcgtcggtctgattattagtctgggaccacgatcccactcgtgttgtcggtctgattatcggtctgggaccacggtcccacttgtattgtcgatcagactatcagcgtgagactacgattccatcaatgcctgtcaagggcaagtattgacatgtcgtcgtaacctgtagaacggagtaacctcggtgtgcggttgtatgcctgctgtggattgctgctgtgtcctgcttatccacaacattttgcgcacggttatgtggacaaaatacctggttacccaggccgtgccggcacgttaaccgggctgcatccgatgcaagtgtgtcgctgtcgacgagctcgcgagctcggacatgaggttgccccgtattcagtgtcgctgatttgtattgtctgaagttgtttttacgttaagttgatgcagatcaattaatacgatacctgcgtcataattgattatttgacgtggtttgatggcctccacgcacgttgtgatatgtagatgataatcattatcactttacgggtcctttccggtgatccgacaggttacggggcggcgacctcgcgggttttcgctatttatgaaaattttccggtttaaggcgtttccgttcttcttcgtcataacttaatgtttttatttaaaataccctctgaaaagaaaggaaacgacaggtgctgaaagcgagctttttggcctctgtcgtttcctttctctgtttttgtccgtggaatgaacaatggaagtccgagctcatcgctaataacttcgtatagcatacattatacgaagttatattcgatgcggccgcaagcttgaagagctcttctttcagaacgctcggttgccgccgggcgttttttatgagacgtctcggcctgtttggccatta

SEQ ID NO: 6 - DNA, 865 bp, synthetic construct
  misc_feature 1..865: note = segment 1-1
  source 1..865: mol_type = other DNA
cacctgcgatcattagcggccgccctgcaggcagctgcgcgctcgctcgctcactgaggccgcccgggcaaagcccgggcgtcgggcgacctttggtcgcccggcctcagtgagcgagcgagcgcgcagagagggagtggccaactccatcactaggggttcctggccttgatggccaattcgattcgattagggcctacttggcctaatagtaatcaattacggggtcattagttcatagcccatatatggagttccgcgttacataacttacggtaaatggcccgcctggctgaccgcccaacgacccccgcccattgacgtcaataatgacgtatgttcccatagtaacgccaatagggactttccattgacgtcaatgggtggagtatttacggtaaactgcccacttggcagtacatcaagtgtatcatatgccaagtacgccccctattgacgtcaatgacggtaaatggcccgcctggcattatgcccagtacatgaccttatgggactttcctacttggcagtacatctacgtattagtcatcgctattaccatggtgatgcggttttggcagtacatcaatgggcgtggatagcggtttgactcacggggatttccaagtctccaccccattgacgtcaatgggagtttgttttggcaccaaaatcaacgggactttccaaaatgtcgtaacaactccgccccattgacgcaaatgggcggtaggcgtgtacggtgggaggtctatataagcagagctggtttagtgaaccgtcagatgccaccatggtgagcaagggcgaggagctgttcaccggggtggtgcccatcctggtcgagctggacggatcgcaggtg

SEQ ID NO: 7 - DNA, 870 bp, synthetic construct
  misc_feature 1..870: note = segment 1-2
  source 1..870: mol_type = other DNA
cacctgcgatcgacggcgacgtaaacggccacaagttcagcgtgtccggcgagggcgagggcgatgccacctacggcaagctgaccctgaagttcatctgcaccaccggcaagctgcccgtgccctggcccaccctcgtgaccaccctgacctacggcgtgcagtgcttcagccgctaccccgaccacatgaagcagcacgacttcttcaagtccgccatgcccgaaggctacgtccaggagcgcaccatcttcttcaaggacgacggcaactacaagacccgcgccgaggtgaagttcgagggcgacaccctggtgaaccgcatcgagctgaagggcatcgacttcaaggaggacggcaacatcctggggcacaagctggagtacaactacaacagccacaacgtctatatcatggccgacaagcagaagaacggcatcaaggtgaacttcaagatccgccacaacatcgaggacggcagcgtgcagctcgccgaccactaccagcagaacacccccatcggcgacggccccgtgctgctgcccgacaaccactacctgagcacccagtccgccctgagcaaagaccccaacgagaagcgcgatcacatggtcctgctggagttcgtgaccgccgccgggatcactctcggcatggacgagctgtacaagtaagggtggcatccctgtgacccctccccagtgcctctcctggccctggaagttgccactccagtgcccaccagccttgtcctaataaaattaagttgcatcattttgtctgactaggtgtccttctataatattatggggtggaggggggtggtatggagcaaggggcaagttgggaagacaacctggatcgcaggtg

SEQ ID NO: 8 - DNA, 866 bp, synthetic construct
  misc_feature 1..866: note = segment 1-3
  source 1..866: mol_type = other DNA
cacctgcgatccctgtagggcctgcggggtctattgggaaccaagctggagtgcagtggcacaatcttggctcactgcaatctccgcctcctgggttcaagcgattctcctgcctcagcctcccgagttgttgggattccaggcatgcatgaccaggctcagctaatttttgtttttttggtagagacggggtttcaccatattggccaggctggtctccaactcctaatctcaggtgatctacccaccttggcctcccaaattgctgggattacaggcgtgaaccactgctcccttccctgtccttaggaacccctagtgatggagttggccactccctctctgcgcgctcgctcgctcactgaggccgggcgaccaaaggtcgcccgacgcccgggctttgcccgggcggcctcagtgagcgagcgagcgcgcagctgcctgcaggggcctgattggccatccgtagatgtacctggacatccaggtgatgccggcggcggtggtggaggcgcgcggaaagtcgcggacgcggttccagatgttgcgcagcggcaaaaagtgctccatggtcgggacgctctggccggtgaggcgtgcgcagtcgttgacgctctagaccgtgcaaaaggagagcctgtaagcgggcactcttccgtggtctggtggataaattcgcaagggtatcatggcggacgaccggggttcgaaccccggatccggccgtccgccgtgatccatgcggttaccgcccgcgtgtcgaacccaggtgtgcgacgtcagacaacgggggagcgctccttttggcttccttccaggcgcggcggctgctgcgctagcttttttggccactgggatcgcaggtg

SEQ ID NO: 9 - DNA, 860 bp, synthetic construct
  misc_feature 1..860: note = segment 1-4
  source 1..860: mol_type = other DNA
cgtctcgctggccgcgcgcggcgtaagcggttaggctggaaagcgaaagcattaagtggctcgctccctgtagccggagggttattttccaagggttgagtcgcaggacccccggttcgagtctcgggccggccggactgcggcgaacgggggtttgcctccccgtcatgcaagaccccgcttgcaaattcctccggaaacagggacgagccccttttttgcttttcccagatgcatccggtgctgcggcagatgcgcccccctcctcagcagcggcaagagcaagagcagcggcagacatgcagggcaccctccccttctcctaccgcgtcaggaggggcaacatccggtacccaactccatgcttaacagtccccaggtacagcccaccctgcgtcgcaaccaggaacagctctacagcttcctggagcgccactcgccctacttccgcagccacagtgcgcagattaggagcgccacttctttttgtcacttgaaaaacatgtaaaaataatgtactaggagacactttcaataaaggcaaatgtttttatttgtacactctcgggtgattatttaccccccacccttgccgtctgcgccgtttaaaaatcaaaggggttctgccgcgcatcgctatgcgccactggcagggacacgttgcgatactggtgtttagtgctccacttaaactcaggcacaaccatccgcggcagctcggtgaagttttcactccacaggctgcgcaccatcaccaacgcgtttagcaggtcgggcgccgatatcttgaagtcgcagttggggcctccgccctgcgcgcgcgagttgcgatacacagggttgcagcactggaggagacg

SEQ ID NO: 10 - DNA, 853 bp, synthetic construct
  misc_feature 1..853: note = segment 1-5
  source 1..853: mol_type = other DNA
cacctgcgatctggaacactatcagcgccgggtggtgcacgctggccagcacgctcttgtcggagatcagatccgcgtccaggtcctccgcgttgctcagggcgaacggagtcaactttggtagctgccttcccaaaaagggtgcatgcccaggctttgagttgcactcgcaccgtagtggcatcagaaggtgaccgtgcccggtctgggcgttaggatacagcgcctgcatgaaagccttgatctgcttaaaagccacctgagcctttgcgccttcagagaagaacatgccgcaagacttgccggaaaactgattggcaggacaggccgcgtcatgcacgcagcaccttgcgtcggtgttggagatctgcaccacatttcggccccaccggttcttcacgatcttggccttgctagactgctccttcagcgcgcgctgcccgttttcgctcgtcacatccatttcaatcacgtgctccttatttatcataatgctcccgtgtagacacttaagctcgccttcgatctcagcgcagcggtgcagccacaacgcgcagcccgtgggctcgtggtgcttgtaggttacctctgcaaacgactgcaggtacgcctgcaggaatcgccccatcatcgtcacaaaggtcttgttgctggtgaaggtcagctgcaacccgcggtgctcctcgtttagccaggtcttgcatacggccgccagagcttccacttggtcaggcagtagcttgaagtttgcctttagatcgttatccacgtggtacttgtccatcaacgcgcgcgcagcctccatgcccttctcccacgcagacacgatcggcaggctcagcgatcgcaggtg

SEQ ID NO: 11 - DNA, 861 bp, synthetic construct
  misc_feature 1..861: note = segment 1-6
  source 1..861: mol_type = other DNA
cacctgcgatccagcgggtttatcaccgtgctttcactttccgcttcactggactcttccttttcctcttgcgtccgcataccccgcgccactgggtcgtcttcattcagccgccgcaccgtgcgcttacctcccttgccgtgcttgattagcaccggtgggttgctgaaacccaccatttgtagcgccacatcttctctttcttcctcgctgtccacgatcacctctggggatggcgggcgctcgggcttgggagaggggcgcttctttttctttttggacgcaatggccaaatccgccgtcgaggtcgatggccgcgggctgggtgtgcgcggcaccagcgcatcttgtgacgagtcttcttcgtcctcggactcgagacgccgcctcagccgcttttttgggggcgcgcggggaggcggcggcgacggcgacggggacgacacgtcctccatggttggtggacgtcgcgccgcaccgcgtccgcgctcgggggtggtttcgcgctgctcctcttcccgactggccatttccttctcctataggcagaaaaagatcatggagtcagtcgagaaggaggacagcctaaccgccccctttgagttcgccaccaccgcctccaccgatgccgccaacgcgcctaccaccttccccgtcgaggcacccccgcttgaggaggaggaagtgattatcgagcaggacccaggttttgtaagcgaagacgacgaggatcgctcagtaccaacagaggataaaaagcaagaccaggacgacgcagaggcaaacgaggaacaagtcgggcggggggaccaaaggcatggcgactacctagatgtgggagacgacgtgcgatcgcaggtg

SEQ ID NO: 12 - DNA, 877 bp, synthetic construct
  misc_feature 1..877: note = segment 1-7
  source 1..877: mol_type = other DNA
cacctgcgatcgtgctgttgaagcatctgcagcgccagtgcgccattatctgcgacgcgttgcaagagcgcagcgatgtgcccctcgccatagcggatgtcagccttgcctacgaacgccacctgttctcaccgcgcgtaccccccaaacgccaagaaaacggcacatgcgagcccaacccgcgcctcaacttctaccccgtatttgccgtgccagaggtgcttgccacctatcacatctttttccaaaactgcaagatacccctatcctgccgtgccaaccgcagccgagcggacaagcagctggccttgcggcagggcgctgtcatacctgatatcgcctcgctcgacgaagtgccaaaaatctttgagggtcttggacgcgacgagaaacgcgcggcaaacgctctgcaacaagaaaacagcgaaaatgaaagtcactgtggagtgctggtggaacttgagggtgacaacgcgcgcctagccgtgctgaaacgcagcatcgaggtcacccactttgcctacccggcacttaacctaccccccaaggttatgagcacagtcatgagcgagctgatcgtgcgccgtgcacgacccctggagagggatgcaaacttgcaagaacaaaccgaggagggcctacccgcagttggcgatgagcagctggcgcgctggcttgagacgcgcgagcctgccgacttggaggagcgacgcaagctaatgatggccgcagtgcttgttaccgtggagcttgagtgcatgcagcggttctttgctgacccggagatgcagcgcaagctagaggaaacgttgcactacacctttcgccagggctacgtgcgccaggcctgcaaaatttccaacgtggatcgcaggtg

SEQ ID NO: 13 - DNA, 849 bp, synthetic construct
  misc_feature 1..849: note = segment 1-8
  source 1..849: mol_type = other DNA
cgtctcgcgtggagctctgcaacctggtctcctaccttggaattttgcacgaaaaccgcctcgggcaaaacgtgcttcattccacgctcaagggcgaggcgcgccgcgactacgtccgcgactgcgtttacttatttctgtgctacacctggcaaacggccatgggcgtgtggcagcaatgcctggaggagcgcaacctaaaggagctgcagaagctgctaaagcaaaacttgaaggacctatggacggccttcaacgagcgctccgtggccgcgcacctggcggacattatcttccccgaacgcctgcttaaaaccctgcaacagggtctgccagacttcaccagtcaaagcatgttgcaaaactttaggaactttatcctagagcgttcaggaattctgcccgccacctgctgtgcgcttcctagcgactttgtgcccattaagtaccgtgaatgccctccgccgctttggggtcactgctaccttctgcagctagccaactaccttgcctaccactccgacatcatggaagacgtgagcggtgacggcctactggagtgtcactgtcgctgcaacctatgcaccccgcaccgctccctggtctgcaattcgcaactgcttagcgaaagtcaaattatcggtacctttgagctgcagggtccctcgcctgacgaaaagtccgcggctccggggttgaaactcactccggggctgtggacgtcggcttaccttcgcaaatttgtacctgaggactaccacgcccacgagattaggttctacgaagaccaatcccgcccgccaaatgcggagcttaccgcctgcgtcattacccagggccacggagacg

SEQ ID NO: 14 - DNA, 861 bp, synthetic construct
  misc_feature 1..861: note = segment 1-9
  source 1..861: mol_type = other DNA
cgtctcgccacatccttggccaattgcaagccatcaacaaagcccgccaagagtttctgctacgaaagggacggggggtttacctggacccccagtccggcgaggagctcaacccaatccccccgccgccgcagccctatcagcagccgcgggcccttgcttcccaggatggcacccaaaaagaagctgcagctgccgccgccgccacccacggacgaggaggaatactgggacagtcaggcagaggaggttttggacgaggaggaggagatgatggaagactgggacagcctagacgaagcttccgaggccgaagaggtgtcagacgaaacaccgtcaccctcggtcgcattcccctcgccggcgccccagaaattggcaaccgttcccagcatcgctacaacctccgctcctcaggcgccgccggcactgcctgttcgccgacccaaccgtagatgggacaccactggaaccagggccggtaagtctaagcagccgccgccgttagcccaagagcaacaacagcgccaaggctaccgctcgtggcgcgggcacaagaacgccatagttgcttgcttgcaagactgtgggggcaacatctccttcgcccgccgctttcttctctaccatcacggcgtggccttcccccgtaacatcctgcattactaccgtcatctctacagcccctactgcaccggcggcagcggcagcggcagcaacagcagcggtcacacagaagcaaaggcgaccggatagcaagactctgacaaagcccaagaaatccacagcggcggcagcagcaggaggaggagcgctgcgtctggcgcccaacgaacccgtatcgacccgcgagcggagacg

SEQ ID NO: 15 - DNA, 849 bp, synthetic construct
  misc_feature 1..849: note = segment 1-10
  source 1..849: mol_type = other DNA
cacctgcgatcgagcttagaaataggatttttcccactctgtatgctatatttcaacaaagcaggggccaagaacaagagctgaaaataaaaaacaggtctctgcgctccctcacccgcagctgcctgtatcacaaaagcgaagatcagcttcggcgcacgctggaagacgcggaggctctcttcagcaaatactgcgcgctgactcttaaggactagtttcgcgccctttctcaaatttaagcgcgaaaactacgtcatctccagcggccacacccggcgccagcacctgtcgtcagcgccattatgagcaaggaaattcccacgccctacatgtggagttaccagccacaaatgggacttgcggctggagctgcccaagactactcaacccgaataaactacatgagcgcgggaccccacatgatatcccgggtcaacggaatccgcgcccaccgaaaccgaattctcctcgaacaggcggctattaccaccacacctcgtaataaccttaatccccgtagttggcccgctgccctggtgtaccaggaaagtcccgctcccaccactgtggtacttcccagagacgcccaggccgaagttcagatgactaactcaggggcgcagcttgcgggcggctttcgtcacagggtgcggtcgcccgggcctagtgaatccacagaaactagcgaggtaagcacttactctatgtcttttacatggtcctgggaaagtggaaaatacaccactgaaacttttgctaccaactcttacaccttctcctacattgcccaggaataaagaatcgtgaacctgttgcatgttatgtttcaacgtgtgatcgcaggtg

SEQ ID NO: 16 - DNA, 874 bp, synthetic construct
  misc_feature 1..874: note = segment 1-11
  source 1..874: mol_type = other DNA
cacctgcgatcgtgtttatttttcaattgcagaaaatttcaagtcatttttcattcagtagtatagccccaccaccacatagcttatattgatcaccgtaccttaatcaaactcacagaaccctagtattcaacctgccacctccctcccaacacacagagtacacagtcctttctccccggctggccttaaaaagcatcatatcatgggtaacagacatattcttaggtgttatattccacacggtttcctgtcgagccaaacgctcatcagtgatattaataaactccccgggcagctcgcttaagttcatgtcgctgtccagctgctgagccacaggctgctgtccaacttgcggttgctcaacgggcggcgaaggggaagtccacgcctacatgggggtagagtcataatcgtgcatcaggatagggcggtggtgctgcagcagcgcgcgaataaactgctgccgccgccgctccgtcctgcaggaatacaacatggcagtggtctcctcagcgatgattcgcaccgcccgcagcatgagacgccttgtcctccgggcacagcagcgcaccctgatctcacttaaatcagcacagtaactgcagcacagcaccacaatattgttcaaaatcccacagtgcaaggcgctgtatccaaagctcatggcggggaccacagaacccacgtggccatcataccacaagcgcaggtagattaagtggcgacccctcataaacacgctggacataaacattacctcttttggcatgttgtaattcaccacctcccggtaccatataaacctctgattaaacatggcgccatccaccaccatcctaaaccagctggccaaaacctgcgatcgcaggtg

SEQ ID NO: 17 - DNA, 859 bp, synthetic construct
  misc_feature 1..859: note = segment 1-12
  source 1..859: mol_type = other DNA
cacctgcgatcctgcccgccggctatgcactgcagggaaccgggactggaacaatgacagtggagagcccaggactcgtaaccatggatcatcatgctcgtcatgatatcaatgttggcacaacacaggcacacgtgcatacacttcctcaggattacaagctcctcccgcgtcagaaccatatcccagggaacaacccattcctgaatcagcgtaaatcccacactgcagggaagacctcgcacgtaactcacgttgtgcattgtcaaagtgttacattcgggcagcagcggatgatcctccagtatggtagcgcgggtctctgtctcaaaaggaggtaggcgatccctactgtacggagtgcgccgagacaaccgagatcgtgttggtcgtagtgtcatgccaaatggaacgccggacgtagtcatatttcctgaagcaaaaccaggtgcgggcgtgacaaacagatctgcgtctccggtctcgtcgcttagctcgctctgtgtagtagttgtagtatatccactctctcaaagcatccaggcgccccctggcttcgggttctatgtaaactccttcatgcgccgctgccctgataacatccaccaccgcagaataagccacacccagccaacctacacattcgttctgcgagtcacacacgggaggagcgggaagagctggaagaaccatgttttttttttttttattccaaaagattatccaaaacctcaaaatgaagatctattaagtgaacgcgctcccctccggtggcgtggtcaaactctacagccaaagaacagataatggcatttgtaagatgttgcacaatggcttccaaaaggcaagatcgcaggtg

SEQ ID NO: 18 - DNA, 857 bp, synthetic construct
  misc_feature 1..857: note = segment 1-13
  source 1..857: mol_type = other DNA
cgtctcggcaaactgccctcacgtccaagtggacgtaaaggctaaacccttcagggtgaatctcctctataaacattccagcaccttcaaccatgcccaaataattttcatctcgccaccttatcaatatgtctctaagcaaatcccgaatattaagtccggccattgtaaaaatctgctccagagcgccctccaccttcagcctcaagcagcgaatcatgattgcaaaaattcaggttcctcacagacctgtataagattcaaaagcggaacattaacaaaaataccgcgatcccgtaggtcccttcgcagggccagctgaacataatcgtgcaggtctgcacggaccagcgcggccacttccccgccaggaaccatgacaaaagaacccacactgattatgacacgcatactcggagctatgctaaccagcgtagcccctatgtaagcttgttgcatgggcggcgatataaaatgcaaggtgctgctcaaaaaatcaggcaaagcctcgcgcaaaaaagcaagcacatcgtagtcatgctcatgcagataaaggcaggtaagttccggaaccaccacagaaaaagacaccatttttctctcaaacatgtctgcgggttcctgcattaaacacaaaataaaataacaaaaaaaaacatttaaacattagaagcctgtcttacaacaggaaaaacaacccttataagcataagacggactacggccatgccggcgtgaccgtaaaaaaactggtcaccgtgattaaaaagcaccaccgacagttcctcggtcatgtccggagtcataatgtaagactcggtaaacacatcaggttggttaacatcggtcaggagacg

SEQ ID NO: 19 - DNA, 846 bp, synthetic construct
  misc_feature 1..846: note = segment 1-14
  source 1..846: mol_type = other DNA
cgtctcggtcagtgctaaaaagcgaccgaaatagcccgggggaatacatacccgcaggcgtagagacaacattacagcccccataggaggtataacaaaattaataggagagaaaaacacataaacacctgaaaaaccctcctgcctaggcaaaatagcaccctcccgctccagaacaacatacagcgcttccacagcggcagccataacagtcagccttaccagtaaaaaaacctattaaaaaacaccactcgacacggcaccagctcaatcagtcacagtgtaaaaagggccaagtacagagcgagtatatataggactaaaaaatgacgtaacggttaaagtccacaaaaaacacccagaaaaccgcacgcgaacctacgcccagaaacgaaagccaaaaaacccacaacttcctcaaatcttcacttccgttttcccacgatacgtcacttcccattttaaaaaaactacaattcccaatacatgcaagttactccgccctaaaacggcctatgtggccgcgcgccgatatcgttaacgccccgcgccggccgctctagaactagtggatcccccggaagatcagaagttcctattccgaagttcctattctctagaaagtataggaacttctgatctgcgcagccgccatgccggggttttacgagattgtgattaaggtccccagcgaccttgacgagcatctgcccggcatttctgacagctttgtgaactgggtggccgagaaggaatgggagttgccgccagattctgacatggatctgaatctgattgagcaggcacccctgaccgtggccgagaagctgcagcgcgacggagacg

SEQ ID NO: 20 - DNA, 855 bp, synthetic construct
  misc_feature 1..855: note = segment 1-15
  source 1..855: mol_type = other DNA
cgtctcgcgactttctgacggaatggcgccgtgtgagtaaggctccggaggcccttttctttgtgcaatttgagaagggagagagctacttccacatgcacgtgctcgtggaaaccaccggggtgaaatccatggttttgggacgtttcctgagtcagattcgcgaaaaactgattcagagaatttaccgcgggatcgagccgactttgccaaactggttcgcggtcacaaagaccagaaatggcgccggaggcgggaacaaggtggtggatgagtgctacatccccaattacttgctccccaaaacccagcctgagctccagtgggcgtggactaatatggaacagtatttaagcgcctgtttgaatctcacggagcgtaaacggttggtggcgcagcatctgacgcacgtgtcgcagacgcaggagcagaacaaagagaatcagaatcccaattctgatgcgccggtgatcagatcaaaaacttcagccaggtacatggagctggtcgggtggctcgtggacaaggggattacctcggagaagcagtggatccaggaggaccaggcctcatacatctccttcaatgcggcctccaactcgcggtcccaaatcaaggctgccttggacaatgcgggaaagattatgagcctgactaaaaccgcccccgactacctggtgggccagcagcccgtggaggacatttccagcaatcggatttataaaattttggaactaaacgggtacgatccccaatatgcggcttccgtctttctgggatgggccacgaaaaagttcggcaagaggaacaccatctggctgtttgggcctgcaactaccgggaagaccggagacg

SEQ ID NO: 21 - DNA, 888 bp, synthetic construct
  misc_feature 1..888: note = segment 1-16
  source 1..888: mol_type = other DNA
cgtctcggaccaacatcgcggaggccatagcccacactgtgcccttctacgggtgcgtaaactggaccaatgagaactttcccttcaacgactgtgtcgacaagatggtgatctggtgggaggaggggaagatgaccgccaaggtcgtggagtcggccaaagccattctcggaggaagcaaggtgcgcgtggaccagaaatgcaagtcctcggcccagatagacccgactcccgtgatcgtcacctccaacaccaacatgtgcgccgtgattgacgggaactcaacgaccttcgaacaccagcagccgttgcaagaccggatgttcaaatttgaactcacccgccgtctggatcatgactttgggaaggtcaccaagcaggaagtcaaagactttttccggtgggcaaaggatcacgtggttgaggtggagcatgaattctacgtcaaaaagggtggagccaagaaaagacccgcccccagtgacgcagatataagtgagcccaaacgggtgcgcgagtcagttgcgcagccatcgacgtcagacgcggaagcttcgatcaactacgcagacaggtaccaaaacaaatgttctcgtcacgtgggcatgaatctgatgctgtttccctgcagacaatgcgagagaatgaatcagaattcaaatatctgcttcactcacggacagaaagactgtttagagtgctttcccgtgtcagaatctcaacccgtttctgtcgtcaaaaaggcgtatcagaaactgtgctacattcatcatatcatgggaaaggtgccagacgcttgcactgcctgcgatctggtcaatgtggatttggatgactgcatctttgaacaataaatgatttaaatcaggtggcctctatggggagacg

SEQ ID NO: 22 - DNA, 865 bp, synthetic construct
  misc_feature 1..865: note = segment 1-17
  source 1..865: mol_type = other DNA
cacctgcgatcatggccatggctgccgatggttatcttccagattggctcgaggacactctctctgaaggaataagacagtggtggaagctcaaacctggcccaccaccaccaaagcccgcagagcggcataaggacgacagcaggggtcttgtgcttcctgggtacaagtacctcggacccttcaacggactcgacaagggagagccggtcaacgaggcagacgccgcggccctcgagcacgacaaagcctacgaccggcagctcgacagcggagacaacccgtacctcaagtacaaccacgccgacgcggagtttcaggagcgccttaaagaagatacgtcttttgggggcaacctcggacgagcagtcttccaggcgaaaaagagggttcttgaacctctgggcctggttgaggaacctgttaagacggctccgggaaaaaagaggccggtagagcactctcctgtggagccagactcctcctcgggaaccggaaaggcgggccagcagcctgcaagaaaaagattgaattttggtcagactggagacgcagactcagtacctgacccccagcctctcggacagccaccagcagccccctctggtctgggaactaatacgatggctacaggcagtggcgcaccaatggcagacaataacgagggcgccgacggagtgggtaattcctcgggaaattggcattgcgattccacatggatgggcgacagagtcatcaccaccagcacccgaacctgggccctgcccacctacaacaaccacctctacaaacaaatttccagccaatcaggagcctcgaacgacaatcactactttggctacagcaccccttgggatcgcaggtg

SEQ ID NO: 23 - DNA, 871 bp, synthetic construct
  misc_feature 1..871: note = segment 1-18
  source 1..871: mol_type = other DNA
cacctgcgatcttgggggtattttgacttcaacagattccactgccacttttcaccacgtgactggcaaagactcatcaacaacaactggggattccgacccaagagactcaacttcaagctctttaacattcaagtcaaagaggtcacgcagaatgacggtacgacgacgattgccaataaccttaccagcacggttcaggtgtttactgactcggagtaccagctcccgtacgtcctcggctcggcgcatcaaggatgcctcccgccgttcccagcagacgtcttcatggtgccacagtatggatacctcaccctgaacaacgggagtcaggcagtaggacgctcttcattttactgcctggagtactttccttctcagatgctgcgtaccggaaacaactttaccttcagctacacttttgaggacgttcctttccacagcagctacgctcacagccagagtctggaccgtctcatgaatcctctcatcgaccagtacctgtattacttgagcagaacaaacactccaagtggaaccaccacgcagtcaaggcttcagttttctcaggccggagcgagtgacattcgggaccagtctaggaactggcttcctggaccctgttaccgccagcagcgagtatcaaagacatctgcggataacaacaacagtgaatactcgtggactggagctaccaagtaccacctcaatggcagagactctctggtgaatccgggcccggccatggcaagccacaaggacgatgaagaaaagttttttcctcagagcggggttctcatctttgggaagcaaggctcagagaaaacaaatgtggacattgaaaaggtcatgattacagagatcgcaggtg

SEQ ID NO: 24 - DNA, 872 bp, synthetic construct
  misc_feature 1..872: note = segment 1-19
  source 1..872: mol_type = other DNA
cacctgcgatccagacgaagaggaaatcaggacaaccaatcccgtggctacggagcagtatggttctgtatctaccaacctccagagaggcaacagacaagcagctaccgcagatgtcaacacacaaggcgttcttccaggcatggtctggcaggacagagatgtgtaccttcaggggcccatctgggcaaagattccacacacggacggacattttcacccctctcccctcatgggtggattcggacttaaacaccctcctccacagattctcatcaagaacaccccggtacctgcgaatccttcgaccaccttcagtgcggcaaagtttgcttccttcatcacacagtactccacgggacaggtcagcgtggagatcgagtgggagctgcagaaggaaaacagcaaacgctggaatcccgaaattcagtacacttccaactacaacaagtctgttaatgtggactttactgtggacactaatggcgtgtattcagagcctcgccccattggcaccagatacctgactcgtaatctgttgcttgttaatcaataaaccgtttaattcgtttcagttgaactttggtctctgcgtatttctttcttatctagtttccatggctacgtagataagtagcatggcgggttaatcattaactacagcccgggcgtttaaacagcgggcggaggggtggagtcgtgacgtgaattacgtcatagggttagggaggtcctgtattagaggtcacgtgagtgttttgcgacattttgcgacaccatgtggtctcgctgggggggggggcccgagtgagcacgcagggtctccattttgaagcgggaggtttgaacgcggccgcaaaagatcgcaggtg

SEQ ID NO: 25 - DNA, 867 bp, synthetic construct
  misc_feature 1..867: note = segment 2-1
  source 1..867: mol_type = other DNA
cacctgcgatcattagcggccgcttgcccactccctctctgcgcgctcgctcgctcggtggggcctgcggaccaaaggtccgcagacggcagagctctgctctgccggccccaccgagcgagcgagcgcgcagagagggagtgggcaactccatcactaggggtaaggccttgatggccaattcgattcgattagggcctacttggcctaatagtaatcaattacggggtcattagttcatagcccatatatggagttccgcgttacataacttacggtaaatggcccgcctggctgaccgcccaacgacccccgcccattgacgtcaataatgacgtatgttcccatagtaacgccaatagggactttccattgacgtcaatgggtggagtatttacggtaaactgcccacttggcagtacatcaagtgtatcatatgccaagtacgccccctattgacgtcaatgacggtaaatggcccgcctggcattatgcccagtacatgaccttatgggactttcctacttggcagtacatctacgtattagtcatcgctattaccatggtgatgcggttttggcagtacatcaatgggcgtggatagcggtttgactcacggggatttccaagtctccaccccattgacgtcaatgggagtttgttttggcaccaaaatcaacgggactttccaaaatgtcgtaacaactccgccccattgacgcaaatgggcggtaggcgtgtacggtgggaggtctatataagcagagctggtttagtgaaccgtcagatgccaccatggtgagcaagggcgaggagctgttcaccggggtggtgcccatcctggtcgagctggacggatcgcaggtg

SEQ ID NO: 26 - DNA, 870 bp, synthetic construct; identical to SEQ ID NO: 7
  misc_feature 1..870: note = segment 2-2
  source 1..870: mol_type = other DNA

SEQ ID NO: 27 - DNA, 870 bp, synthetic construct
  misc_feature 1..870: note = segment 2-3
  source 1..870: mol_type = other DNA
cacctgcgatccctgtagggcctgcggggtctattgggaaccaagctggagtgcagtggcacaatcttggctcactgcaatctccgcctcctgggttcaagcgattctcctgcctcagcctcccgagttgttgggattccaggcatgcatgaccaggctcagctaatttttgtttttttggtagagacggggtttcaccatattggccaggctggtctccaactcctaatctcaggtgatctacccaccttggcctcccaaattgctgggattacaggcgtgaaccactgctcccttccctgtccttttacccctagtgatggagttgcccactccctctctgcgcgctcgctcgctcggtggggcctgcggaccaaaggtccgcagacggcagagctctgctctgccggccccaccgagcgagcgagcgcgcagagagggagtgggcaaggcctgattggccatatatgtatctggacatccatgtgatgccggcagcggtagttgttgctcgcataaattcgcgggctcggttccaaatattgcgcaggggtaaaaagcgttcaatagttgccacgctttgaccggtcaggcgtgcgcagtcttgaatgctctggacatggaaaaaatgaaagttggtaagcgactcccttccgtggtttggtggaaaagtcacaagggtaccatagcgaggaaccccggttcgaaaccggcaggatccgctatgagcacaagtgaggcgcttgcgcgttgaacccggccaaggacccccagacacggagaggagtctttttttatttattttttcttagatgcatcctgtcctgcgacaaatgcgacctcagcccagggcaaccacgatcgcaggtg

SEQ ID NO: 28 - DNA, 875 bp, synthetic construct
  misc_feature 1..875: note = segment 2-4
  source 1..875: mol_type = other DNA
cacctgcgatcccacggcctcagcagcggtggcgctttcgggctctggcgaacaggaagagcctcaatggggtgcctaattgtatgctacaaagtcctcaggtagtgggcacattgcaacgcaatcagaatgaattgtataaattcttaaacaatctgtccccttactttcgtcacaaccgcgagcgcatagaaaaagctacatcttttactaaaatgcaaaatggactcaaataaacgtgtacacaatgcattaataataaaaccattttattagctcattggagtacaagcttgactgttttattaaaaatcaaatggctcttcgcgacagtcgccgtggttggtgggcagggatatgtttctgtactgcaaacgctgatgccacttgaattctggaataacaagcctagggggggagccgtcaaaattttctccccacagctggcgcacaagttgcagggcgcccataacatcaggagcagaaatcttgaagtcgcaattagggccagcattgccgcgcgcattgcgataaactggatttgcgcactgaaaaaccaacaaacacggatacttaatactggctaacgctccagggtcggttacttcgttgatatcaatgttatccacattgctgaggttaaaaggagtgattttacacagttgacgccccatccgtggcaggccatcttgcttgtttaaacattcgcagcgcactggcataaggagacgtttttgcccatgtcgcatgtgagggtagtcggccagcataaaagcttcaatttgcctaaaagctatttgagccttcattccttcagaataaaacaagccgcaggactttccggagaaagaattattcccgcaggatcgcaggtg

SEQ ID NO: 29 - DNA, 863 bp, synthetic construct
  misc_feature 1..863: note = segment 2-5
  source 1..863: mol_type = other DNA
cgtctcggcagccaacatcatgaaaacagcagcgggcatcgtcgtttttaatttgaactacattacgcccccagcggttttgcgccaccttggctttcgaggggttctctttcaacgctcgttgcccactttcgctggttacatccatttccaccaaatgctctttgcgcaccatctccattccatgcaggcatctaagctccccttcgcgctcggtacacttatgctcccacacgcagcaaccggtgggttcccaggaattctgttggacaccggcataagcttgcatatatccttgcaaaaagcgtcccatgagctcctgaaaggttttttgggatgaaaaagtcagctgcaaaccgcgcttttcttcgttgagccatgttgtgcatattttcttgtacacgctgccctgatccggcaaaaaacgaaaggtggcgcgctcgtcgtgatccacatggtacttttccattagcatagccatggcttccatgcctttttcccaagctgaaactaggggctggcttgccggattgcgaacaacaacaacattcttttcattttcgtcgctgttttgagcggaagccttcaaaacgtgtacctgcctggtttccattttttgaaaagactgagaaccgtctgcatgatgcataatgcggacgggcggcatgctgaaacccattactcctaaaactgctcttggtggttctgcctcttcttcttctgcactctctggggaaagaggtatcgcagccatagatttcttgacttttttctttggaggtaaaggcacagcttccagttcttcttcgctttcggaatccagaaagtatctgcccatttttggcggcggcggctgggagacg

SEQ ID NO: 30 - DNA, 858 bp, synthetic construct
  misc_feature 1..858: note = segment 2-6
  source 1..858: mol_type = other DNA
cgtctcggctgagcgctgcggtctggggtgcgctccctctgtgagtgctgattgctggccattatttaatcctaggcaaagaaacacatgatggatctggagccacaggaaagcttaaccgcccccaccgctcccgccattggcgctacggctgtcatggagaaggacaaaagtctactcataccccaagacgcaccggttgagcagaacttgggctacgagactccccccgaggaatttgaaggctttcttcaaatccaaaagcaaccaaatgagcaaaacgctgggctcgaggaccatgactacctaaacgagggagatgtcctgtttaaacatctacagcgacaaagcactatcgttcgcgacgccatatctgatcgctcttcaataccagtttcaattgcagaactatcttgcatctacgaacgcaacctgttctccccacgtgtgccccctaaacggcaagccaacggcacatgcgagccaaatcctcgccttaacttctacccagtttttgcagtgccagaagcactggcaacataccatattttctttaaaaatcacaaaatacccctatcctgtcgagctaaccgcagccgcgcagatgagcttcttgctttaagggctggcgcttccatacctgggattgtgtccttggaagaggtgcctaaaatttttgaaggtttaggtcgggatgaaaaacgagcagcaaatgccctgcaaaaagaaaatgaacaaaatcaccatgggaatagtgctctaatagaactggaaggtgacaatgcccgcctggcagttttaaagcgcaatattgaggttactcactttgcctacccggcagtaaatcttccggagacg

SEQ ID NO: 31 - DNA, 853 bp, synthetic construct
  misc_feature 1..853: note = segment 2-7
  source 1..853: mol_type = other DNA
cacctgcgatcttccgccaaaggtaatgagcgcagtgatgaatcagctactaattaagcgagcccaacccattgacaaagatgcaaacttgcaagacccggaggcaacagatgatggaaagccggttgtaagcgacgagcaattaactaagtggttgggaacagacaattccaacgaactacaacagcggcgtaaactcatgatggccgccgtacttgtaactgtggaactcgagtgcatgcatcgttttttctccgacatcaccacattgcgcaaaattgaggaatgtcttcactacactttccgccatggctacgtgcgccaagcctgtaaaatttctaatgtggagctgagcaatctagtttcttacatgggcatcttgcatgaaaaccgattgggacagaacgtgctacactcaacactacgcgatgaagcacgcagagattacgtgcgagactgcatttaccttttcctgttacatacctggcaaactgggatgggtgtttggcagcaatgcttggaagaaaaaaaccttcgagaactaaacaaactgttagacagagcactaaaatccctatggaccggttttgacgaacggacagtagctgcagagctagctgacataattttcccagaaaggttaatgataaccttgcaaaacggcttgcctgactttatgagtcaaagtatgctgcacaattatcgctcttttatattagagcgttctgggatgcttcctagcatgtgttgtgcacttccttcagattttgtgcctatatattttagagagtgcccccctcccctgtggagccactgctacttactacgacttgctaactaccgatcgcaggtg

SEQ ID NO: 32 - DNA, 870 bp, synthetic construct
  misc_feature 1..870: note = segment 2-8
  source 1..870: mol_type = other DNA
cacctgcgatctacctagcttaccactcagaccttatgacagattcaagcggcgaaggcctaatggagtgtcactgccgctgcaatctttgcaccccccaccgttctttggtttgcaatactgaactattaagtgaaagtcaagtcattggtaccttcgaaatgcagggaccgcagtctgacagcaatttcacgacgaacctaagacttacccctgggctttggacttctgcctacctgcgcaaatttgaaccccaagattaccacgcccacagtatcaatttttacgaagaccaatccaaacccccaaaagcgccactaacggcttgcgtcattacgcagggaaaaattctagcccaattgcatgctattaagcaagcgcgcgaagagtttttacttaaaaaaggacacggagtgtaccttgatccccaaaccggcgaggaactaaaccttccatcacctttgtgtgctactgcgtctccccattcgcagcatgtccccgaaagccgcaaaacaggctattgcgcagcaacgctcaaagaaacagcagcaacggcaggaaatctgggaggaagaatcttgggagagtcaggcagaggacgaggtcgaggacttggaagaatgggaggaggaggaggcggacagcctagacgaggatccagaggaggaggaggaaggttccaaggacggagcgaccgccgccaaaccgtcgctttcaaccaagccctctccaatgaaacccgctgtgagcaaatctcagaaagccaaccgtagatgggacaccattgaaaccagcgccgcaaacttgggtaagaatcgcaagcaggcgcgtcggggctactgctcatggcgggctcaccgatcgcaggtg

SEQ ID NO: 33 - DNA, 865 bp, synthetic construct
  misc_feature 1..865: note = segment 2-9
  source 1..865: mol_type = other DNA
cgtctcgcaccaaagtaatattgtagcctgctttcagcactgcggggggaatatctcatttgcaaggcggtatttgctataccatgatggagtggcgattccaaggaatgtcctccattactaccgtcatctctacagcccctttgaagagctcgacaaggaaccgacctgcaacagccaagcggcccactagaatcggcaacagcagcaacaaggaaagtcctgaggcgcgcgagttaagaaaacgcatttttcccactttatatgctatttttcagcagagtcgaggtcaagaacacgaactgaaaataaaaaaccgttccctgcgttcacttacccgcagctgtctctacctcaaaagcgaagatcagttgcaacgcaccttgcaggacgcagaagctctgttcaataaatactgctccctctcgcttaaagagtaaaaaaagcccgcgcgcggactttcaacaggcgggaaaagtgacgtcacaacaagatgagtaaagatattcccacgccttacatgtggagctttcaaccccaaatgggactggcggccggcgcggctcaagactattctagcaaaatgaattggttaagcgccggaccccacatgatttccagggtgaatggggtacgagcccggcgtaaccaaatactgctagaacaagccgctctcaccgctacaccacgtaatcaacttaaccctccctcttggccagctgccctgatatatcaggaaaatccccctcctaccactgtacttttgcctcgcgacgcccaggccgaagtccatatgactaacgctggggcacagcttgcgggcggtgcacgtcacagtttcaggtataaaggtcgcacggagacg

SEQ ID NO: 34 - DNA, 864 bp, synthetic construct
  misc_feature 1..864: note = segment 2-10
  source 1..864: mol_type = other DNA
cgtctcggcactgagccctatccgtctaatgaaagttgcatttaatggcattacgtcgctaaatggatactctttaacattcatgtggtcaggtctatcaaactatataaatcagcctttctctacaccatcctgctccttttcttacattacccaagaataaaaacacacacaaaacacaaattgcgtacttattgtttatttttttttttttttacactatacgcgtggttaaactgcctccttcccattttaccttgtatacctccctttccccctttgtagctgaaaacaactgcacttgaatatttcgacttaggttttttggcgttagcgtccacacagtttctttacgggcaaagcgagggtcggtgatggaaacgaatccctcgcccgcacagtcactcaagcggcattccccatccaaaaccaggtccatgattttatcctacaaaaagtaacaacagtcagtgtccatcagccgcccaaggattctctcgttgattataatctccaaataaaattgctcgatgatgcataattaaaccctttagcagttgctgacgataacgttcatgccgactatgttttagagggcgaacagtgttttcagcaattacttgaacaacttttaacattagcagtctggtacgacgagcgcaacagcgcatgcgtatctcacttaagtctttacaataatcacaacacagcactaacatgttatttaaaattccataattaaaggcgctccatccaaaactaactttttctaacgctaaccaggcatggccatcatacataattttaaagtaaattaaatggcgacctctaacaaaggtgcttcccacatacatcacggagacg

SEQ ID NO: 35 - DNA, 867 bp, synthetic construct
  misc_feature 1..867: note = segment 2-11
  source 1..867: mol_type = other DNA
cgtctcgtcacctctttaggcattaaatggttaacaacctcccgataccaaaaacaccttttgttaattaaggcgccatatacggccattttgaaccagcgtcccaaaagcatcccagctgacatacactgtagtgaacccggacgctggcaatgacaatgaataagccaccgctcatgaccatgtaataattgagtaacttcaacatttatagtggcacaacacatacatacactcatgtattttttcaaaataaacatctcataatcagttagaatcatatcccacggtattggccattcctgcagcactgtaaaacctacacatgaaggaatgcctcttacctcacttacattatgtaaagtcagactattacactcaggccataaagaattttccgaagtactcaacgtagcttttgactgttcctcacagggcggtagttggtacttgttgtatggtgccaatctgtagcgataccgtctgtcgcgctgcatcgtaaacaacagacttgcgagcgtcttcgtacttaaaaaaacaaaaccacgtacgaccactggttatcgcacctcgtcctttttgtttgcagcgttggcgttccgtcaaaaaagcaaagtacaaccactctcgcaggcttgctaaaatgtattcagcttcaggtgttatcttcaaatcatgatgtttaataaagcgcagagtatccacacaggatgcatgggctaaaccaagccatgctatgcaggcagccgtgtcccgacttacaggaggaggaggaatacaaggtagaggcataaaaacttaatcaagacggtcagcaaggatttgaatgcgtaaatctcgcaggtggcagcgatcgcctcggagacg

SEQ ID NO: 36 - DNA, 856 bp, synthetic construct
  misc_feature 1..856: note = segment 2-12
  source 1..856: mol_type = other DNA
cgtctcgcctccgctgtgctggtgaaagatcacagccagatcaaattgtaagcgattttccaaatgttcaacaacagcttctaaaagagccacagctctgatttcgataaacaaaagcaaagcaaatgcattatcatgaaactcttctatcatcaaactgcctgactgaaccattcccaggtaattttcattcttccactgttgtattatttgaacacactgattttgcaggtttaaaccgtgaatattaaaaagctctgtaagggcgccctccaccgccatccgcaggcagtacttcatatttgctgaaaaaagtctggatcttcaaacacctgcagtaaattcagtagatttacattaggctccacaccttggtctcgcagctgacatcttaatgccagttgtataaaatcatacaaatcagaagccagcagcaaagaaagttcacctccaggtacaagttccggagttcccacagaacatacaacttgcacaaatggacccatattagtaagcgtggcgccaacgtagacatcgcgcataggaggagttaaataatgcattaccagcagccaaaactcaggtagcacgtctttaagaaacgtcaccacctcaaaatctaagccatgcaaatagttccgtaaagactccggaaacaacacggagtaatgaacaagcgacctctgaaacatgctttaggttagcctgaaaaataaaaatatgttaaattaaagatgcctggcaaacgggtggaaaaacaactctacttaaaagcaagcgcgcgactggctgctttgcgcgaacatcgcaaaacacgtcggaatgattaaacaacaaaacactgagctcggagacg

SEQ ID NO: 37 - DNA, 866 bp, synthetic construct
  misc_feature 1..866: note = segment 2-13
  source 1..866: mol_type = other DNA
cgtctcggctccattcttgagcctggataaagcgtttcagcgccaacaaaaacccctctggcgttcatgtcgcataatgaaaacaatgttcccaaatatccaggaggaatatcaactgctatgtgcaaatataaaagcacaactccatgtggaggtataacaaaattcgcaggagaaaataacacataagcattagagtcgccctcttgtttaggcaacatagccccaggtcccgtaaaatacacataaagagtctcaaaagcagccataatgccttaccagaaaaacagtacaaagccaggcacagcagacacaatctgccgcaagtgcgcacctttaatactgaaaaatagtgacgtaaatggccaaagttcgcctacacaacacaaaaaaaaccccaaaagcccgcgaaaaaaatcacttccgcatatgactcggcataatacggtgttctcacgacggcctatgtggcctcgcgaagcgcctcccacgctgccgcgtcagcgctgacgtaaattacgtcataggggagtggtcctgtattagctgtcacgtgagtgcttttgcgacattttgcgacaccacgtggccatttagggtatatatggccgagtgagcgagcaggatctccattttgaccgcgaaatttgaacgagcagcagccatgccgggcttctacgagatcgtgatcaaggtgccgagcgacctggacgagcacctgccgggcatttctgactcgtttgtgagctgggtggccgagaaggaatgggagctgcccccggattctgacatggatctgaatctgattgagcaggcacccctgaccgtggccgagaagctgcagcgcgacttcctggtcggagacg

SEQ ID NO: 38 - DNA, 867 bp, synthetic construct
  misc_feature 1..867: note = segment 2-14
  source 1..867: mol_type = other DNA
cacctgcgatcggtccaatggcgccgcgtgagtaaggctccggaggccctcttctttgttcagttcgagaagggcgagtcctacttccacctccatattctggtggagaccacgggggtcaaatccatggtgctgggccgcttcctgagtcagattagggacaagctggtgcagaccatctaccgcgggatcgagccgaccctgcccaactggttcgcggtgaccaagacgcgtaatggcgccggaggggggaacaaggtggtggacgagtgctacatccccaactacctcctgcccaagactcagcccgagctgcagtgggcgtggactaacatggaggagtatataagcgcctgtttgaacctggccgagcgcaaacggctcgtggcgcagcacctgacccacgtcagccagacccaggagcagaacaaggagaatctgaaccccaattctgacgcgcctgtcatccggtcaaaaacctccgcgcgctacatggagctggtcgggtggctggtggaccggggcatcacctccgagaagcagtggatccaggaggaccaggcctcgtacatctccttcaacgccgcttccaactcgcggtcccagatcaaggccgctctggacaatgccggcaagatcatggcgctgaccaaatccgcgcccgactacctggtaggccccgctccgcccgcggacattaaaaccaaccgcatctaccgcatcctggagctgaacggctacgaacctgcctacgccggctccgtctttctcggctgggcccagaaaaggttcgggaagcgcaacaccatctggctgtttgggccggccaccacgggcaagaccaacatcgcggaaggatcgcaggtg

SEQ ID NO: 39 - DNA, 889 bp, synthetic construct
  misc_feature 1..889: note = segment 2-15
  source 1..889: mol_type = other DNA
cacctgcgatcgaagccatcgcccacgccgtgcccttctacggctgcgtcaactggaccaatgagaactttcccttcaatgattgcgtcgacaagatggtgatctggtgggaggagggcaagatgacggccaaggtcgtggagtccgccaaggccattctcggcggcagcaaggtgcgcgtggaccaaaagtgcaagtcgtccgcccagatcgaccccacccccgtgatcgtcacctccaacaccaacatgtgcgccgtgattgacgggaacagcaccaccttcgagcaccagcagccgttgcaggaccggatgttcaaatttgaactcacccgccgtctggagcatgactttggcaaggtgacaaagcaggaagtcaaagagttcttccgctgggcgcaggatcacgtgaccgaggtggcgcatgagttctacgtcagaaagggtggagccaacaaaagacccgcccccgatgacgcggataaaagcgagcccaagcgggcctgcccctcagtcgcggatccatcgacgtcagacgcggaaggagctccggtggactttgccgacaggtaccaaaacaaatgttctcgtcacgcgggcatgcttcagatgctgtttccctgcaagacatgcgagagaatgaatcagaatttcaacatttgcttcacgcacgggacgagagactgttcagagtgcttccccggcgtgtcagaatctcaaccggtcgtcagaaagaggacgtatcggaaactctgtgccattcatcatctgctggggcgggctcccgagattgcttgctcggcctgcgatctggtcaacgtggacctggatgactgtgtttctgagcaataaatgacttaaaccaggtggcctctatgggatcgcaggtg

SEQ ID NO: 40 - DNA, 865 bp, synthetic construct; identical to SEQ ID NO: 22
  misc_feature 1..865: note = segment 2-16
  source 1..865: mol_type = other DNA

SEQ ID NO: 41 - DNA, 871 bp, synthetic construct; identical to SEQ ID NO: 23
  misc_feature 1..871: note = segment 2-17
  source 1..871: mol_type = other DNA

SEQ ID NO: 42 - DNA, 872 bp, synthetic construct; identical to SEQ ID NO: 24
  misc_feature 1..872: note = segment 2-18
  source 1..872: mol_type = other DNA

SEQ ID NO: 43 - DNA, 869 bp, synthetic construct
  misc_feature 1..869: note = segment 3-1
  source 1..869: mol_type = other DNA
cacctgcgatcattagcggccgcttggccactccctctctgcgcgctcgctcgctcactgaggccgggcgaccaaaggtcgcccgacgcccgggctttgcccgggcggcctcagtgagcgagcgagcgcgcagagagggagtggccaactccatcactaggggttcctggccttgatggccaattcgattcgattagggcctacttggcctaatagtaatcaattacggggtcattagttcatagcccatatatggagttccgcgttacataacttacggtaaatggcccgcctggctgaccgcccaacgacccccgcccattgacgtcaataatgacgtatgttcccatagtaacgccaatagggactttccattgacgtcaatgggtggagtatttacggtaaactgcccacttggcagtacatcaagtgtatcatatgccaagtacgccccctattgacgtcaatgacggtaaatggcccgcctggcattatgcccagtacatgaccttatgggactttcctacttggcagtacatctacgtattagtcatcgctattaccatggtgatgcggttttggcagtacatcaatgggcgtggatagcggtttgactcacggggatttccaagtctccaccccattgacgtcaatgggagtttgttttggcaccaaaatcaacgggactttccaaaatgtcgtaacaactccgccccattgacgcaaatgggcggtaggcgtgtacggtgggaggtctatataagcagagctggtttagtgaaccgtcagatgccaccatggtgagcaagggcgaggagctgttcaccggggtggtgcccatcctggtcgagctggacggatcgcaggtg

SEQ ID NO: 44 - DNA, 870 bp, synthetic construct; identical to SEQ ID NO: 7
  misc_feature 1..870: note = segment 3-2
  source 1..870: mol_type = other DNA

SEQ ID NO: 45 - DNA, 830 bp, synthetic construct
  misc_feature 1..830: note = segment 3-3
  source 1..830: mol_type = other DNA
cacctgcgatccctgtagggcctgcggggtctattgggaaccaagctggagtgcagtggcacaatcttggctcactgcaatctccgcctcctgggttcaagcgattctcctgcctcagcctcccgagttgttgggattccaggcatgcatgaccaggctcagctaatttttgtttttttggtagagacggggtttcaccatattggccaggctggtctccaactcctaatctcaggtgatctacccaccttggcctcccaaattgctgggattacaggcgtgaaccactgctcccttccctgtccttaggaacccctagtgatggagttggccactccctctctgcgcgctcgctcgctcactgaggccgggcgaccaaaggtcgcccgacgcccgggctttgcccgggcggcctcagtgagcgagcgagcgcgcagagagggagtggccaaggcctgattggccgtagatgtacctggacatccaggtgattcctgcggcggtagtggaagcccgaggaaactcgcgtacgcggttccaaatgttgcgtagcggcatgaagtagttcattgtaggcacggtttgaccagtgaggcgcgcgcagtcattgatgctctatagacacgaagaaaatgaaagcgttcagcgactcgactctgtagcctggaggaacgtgaacgggttgggtcgcggtgtaccccggttcaagacttgtactcgagccggccggagccgcggctaacgtggtattggcactcccgtctcgacccagcctacaaaaatccaggatacggaatcgagtcgttttgctggttgctggatcgcaggtg

SEQ ID NO: 46 - DNA, 825 bp, synthetic construct
  misc_feature 1..825: note = segment 3-4
  source 1..825: mol_type = other DNA
ggtctcggctgaatggcagggaagtgagtcctatttttttttttgccgctcagatgcatcccgtgctgcgacagatgcgtccccaacaacagcccccctcgcagcagcagcaaccacaaaaggctgtccctgcaactactgcaactgccgccgactggagtgccaaacaacatgcttcattctcctaaagtccagcccaccctgtgtgacaatcaaaaagcactctaccattttctcaatacccattcgccttattttcgctcccatcgtacacacatcgaaagggccactgcgttcgaccgtatggatgtgcaataatgactcatgtaaacaacgtgttgaataaacagcactttattttttacacgtatcaaggctctggattacttatttatttacaagtcgaatgggttctgacgagaatcagaatgacccgcgggcagtgatacgttgcggaactgatacttgggttgccacttgaattcgggaatcaccaacttgggaaccggtatatcgggtaggatgtcactccacagctttctggtcagctgcaaagctcccagcaggtcaggagccgaaatcttgaaatcacaattaggaccagtgctctgagcgcgagagttgcggtacaccggattgcagcactgaaacaccatcagcgacggatgtctcacgcttgccagcacggtgggatctgcaatcatgcccacatccagatcttcagcattggcaatgctgaacggggtcatcttgcaggtctgcctacccatggcgggcacccaattaggcttgtggttgcaatcgcagtgcagggggatggagacc

SEQ ID NO: 47 - DNA, 836 bp, synthetic construct
  misc_feature 1..836: note = segment 3-5
  source 1..836: mol_type = other DNA
cacctgcgatcggattagtatcatcttggcctgatcctgtctgattcctggatacacggctctcatgaaagcatcatattgcttgaaagcctgctgggctttactaccctcggtatagaacatcccgcaggacctgctcgaaaactggttagctgcgcagccggcatcattcacacagcagcgggcgtcattgttggctatttgcaccacacttctgccccagcggttttgggtgattttggttcgctcgggattctccttcaaggctcgttgtccattctcgctggccacatccatctcgataatctgctccttctgaatcataatagtgccatgcaggcacttcagcttgccctcataatcattgcagccatgaggccacaacgcacagcctgtacattcccaattatggtgggcgatctgagaaaaagaatgtatcattccctgcagaaatcttcccatcatcgtgctcagtgtcttgtgactagtgaaagttaactggatgcctcggtgctcctcgtttacgtactggtgacagatgcgcttgtattgttcgtgctgctcaggcattagtttaaaagaggttctaagttcgttatccagcctgtacttctccatcagtacacacatcacttccatgcccttctcccaagcagacaccaggggcaagctaatcggattcttaacagtacaggcagcagctcctttagccagaggatcatctttggcaatcttttcaatgcttcttttgccatccttctcaacgatgcgcacgggcgggtagctgaaacctactgctacaagctgcgcctcttctctttcttcgatcgcaggtg

SEQ ID NO: 48 - DNA, 822 bp, synthetic construct
  misc_feature 1..822: note = segment 3-6
  source 1..822: mol_type = other DNA
ggtctcgcttcttcgctgtcttgactgatgtcttgcatgggaacatgtttggtcttccttggcttctttttggggggtatcgggggaggaggactgtcgctccgttccggagacagggaggattgtgaagtttcgctcaccattaccaactgactgtcggtagaagaacctgaccccacacggcgacaggtgtttctcttcgggggcagaggtggaggcgattgcgaagggctgcggtccgacctggaaggcggatgactggcagaaccccttccgcgttcgggggtgtgctccctgtggcggtcgcttaactgatttccttcgcggctggccattgtgttctcctaggcagagaaacaacagacatggaaactcagccattgctgtcaacatcgccacaagtgccatcacatctcgtcgtcagcgacgaggaaaaggagcagagcttaaccattccaccgcccagtcctgccaccacctctaccctagaagataaggaggtcgacgcatctcatgacatgcagaataaaaaagcgaaagagtctgaaacagacatcgagcaagacccgggctatgtgacaccggtggaacacgaggaagagttgaaacgctttctagagagagaggatgaaaactgcccaaaacagcaagcggataactatcaccaagatgctggaaatagggatcagaacaccgactacctcatagggcttgacggggaagacgcgctccttaaacatctagcaagacagtcactcatagtcaaggatgcattattggacagaactgaagtgcccatcagtgtggaagagctcggagacc

SEQ ID NO: 49 - DNA, 820 bp, synthetic construct
  misc_feature 1..820: note = segment 3-7
  source 1..820: mol_type = other DNA
ggtctcggctcagccgcgcctacgagcttaaccttttttcacctcgtactccccccaaacgccagccaaacggcacctgcgagccaaatcctcgcttaaacttttatccagcttttgctgtgccagaagtactcgctacttatcacatcttttttaaaaatcaaaaaattccagtctcctgccgcgctaatcgcacccgcgctgacgccctacttaatctgggacctggttcacgcttacctgatatagcttccttggaagaggttccaaaaatcttcgagggtctgggcaataatgagactcgggccgcaaatgctctgcaaaagggagaaaatggcatggatgagcatcacagcgttctggtggaattggagggcgataatgccagactcgcagtactcaagcgaagcgtcgaggtcacacactttgcataccccgctgtcaacctgccccctaaagttatgacggcggtcatggaccagttactcattaagcgcgcaagtcccctttcagaagacatgcatgacccagacgcctgtgatgagggtaaaccagtggtcagtgatgagcagctaacccgatggctggacaccgactctccccgggatttggaagagcgtcgcaagcttatgatggccgtagtgctggttaccgtagaactagagtgtctccggcgtttctttaccgattcagaaaccttgcgcaaactcgaagagaatctgcactacacttttagacacggctttgtgcggcaggcgtgcaagatatctaacgtggaactcaccaacctggtttcctacatgggtattctgcggagacc

SEQ ID NO: 50 - DNA, 826 bp, synthetic construct
  misc_feature 1..826: note = segment 3-8
  source 1..826: mol_type = other DNA
ggtctcgctgcatgagaatcgtctaggacaaagcgtgctgcacagcacccttaagggggaagcccgccgtgattacatccgcgattgtgtctatctctacctgtgccacacgtggcaaaccggcatgggtgtatggcagcaatgtttagaagaacagaacttgaaagagcttaacaagctcttacagaaatctcttaaggttctgtggacagggttcgacgagcgcaccgtcgcttccgacctggcagacctcatcttcccagagcgtcttagggttactttgcgaaacggactgcctgactttatgagccagagcatgcttaacaattttcgctctttcatcctggaacgctccggtatcctgcccgccacctgctgcgcactgccctccgactttgtgcctctcacctaccgcgagtgccccccgccgctatggagtcactgctacctgttccgtctggccaactacctctcctaccactcggatgtgatcgaggatgtgagcggagacggcttgctggagtgtcactgccgctgcaatctgtgcacgccccaccggtccctagcttgcaacccccagttgatgagcgaaacccagataataggcacctttgaactgcaaggccccagcagccaaggcgatgggtcttctcctgggcaaagtttaaaactgaccccgggactgtggacctctgcctacttgcgcaagtttgccccggaagattaccacccctatgaaatcaagttctatgaggaccaatcacagcctccaaaggccgaactttcggcctgcgtcatcacccagggggcaattctagcggagacc

SEQ ID NO: 51 - DNA, 832 bp, synthetic construct
  misc_feature 1..832: note = segment 3-9
  source 1..832: mol_type = other DNA
cacctgcgatctagcccaattgcaagccatccaaaaatcccgccaagaatttctactgaaaaagggtaagggggtctaccttgacccccagaccggcgaggaactcaacacaaggttccctcaggatgtcccaacgacgagaaagcaagaagttgaaggtgcagccgccgcccccagaagatatggaggaagattgggacagtcaggcagaggaagcggaggaggacagtctggaggacagtctggaggaagacagtttggaggaggaaaacgaggaggcagaggaggtggaagaagtaaccgccgacaaacagttatccccggctgcggagacaagcaacagcgctatcatctccgctccgagtcgaggaacgcggcggcgtcccagcagtagatgggacgagaccggacgcttcccgaacccaaccaccgcttccaagaccggtaagaaggatcggcagggatacaagtcctggcgggggcataagaatgccatcatctcctgcttgcatgagtgcgggggaaacatatccttcacgcgacgctacttgctattccaccatggggtgaactttccacgcaatgttttgcattactaccgtcacctccacagcccctactatagccagcaaatcccggcaatctcgacagaaaaagacagcggcggcgacctccaacagaaaaccagcagcggcagttaaaaaatacacaacaagtgcagcaacaggaggattaaagattacagccaacgagccagcgcaaacccgagagctaagaaatcggatctttccaaccctgtatgccatcttccagcagagtcggatcgcaggtg

SEQ ID NO: 52 - DNA, 823 bp, synthetic construct
  misc_feature 1..823: note = segment 3-10
  source 1..823: mol_type = other DNA
ggtctcggtcggggccaagagcaggaactgaaaataaaaaaccgatctttgcgttcgctcaccagaagttgtttgtatcacaagagcgaagatcaacttcagcgcactcttgaggacgccgaggctctcttcaacaagtactgcgcgctgactcttaaagagtaggcagcgaccgcgcttattcaaaaaaggcgggaattacatcatcctcgtcatgagtaaagaaattcccacgccttacatgtggagttatcagccccaaatgggattggcggcaggcgcctcccaggactactccacccgcatgaattggctcagcgccgggccttctatgatttctcgagttaatgatatacgcgcctaccgaaaccaaatacttttggaacagtcagctcttaccaccacgccccgccaacaccttaatcccagaaattggcccgccgccctagtataccaggaaagtcccgctcccaccactgtattacttcctcgagacgcccaggccgaagtccaaatgactaatgcaggtgcgcagttagctggcggctccaccctatgtcgtcacaggcctcggtgcttaaccaaagagcaataagagctgatacatcatattgtattcgtataacttggtcctggaacacaggagatgccccagaggggcaaacctctgctacaaccctagttacctccccatttaccttttactacatcagagaagacgactgacaaataaagtttaacttgtttatttgaaaatcaattcacaaactccgagtagttattttgcctcccccttcccatttaacagaatataccggagacc

SEQ ID NO: 53 - DNA, 831 bp, synthetic construct
  misc_feature 1..831: note = segment 3-11
  source 1..831: mol_type = other DNA
cacctgcgatctaccaatctctccccacgcacagctttaaacatttggataccattagagatagacatggttttagattccacattccaaacagtttcagagcgagccaatctggggtcagtgatagataaaaatccatcgggatagtcttttaaagcgctttcacagtccaactgatgcggatgcgactccggagtctggatcacggtcatctggaagaagaacgatgggaatcataatccgaaaacgggatcgggcgattgtgtctcatcaaacccacaagcagccgctgtctgcgtcgctccgtgcgactgctgtttatgggatcgggatccacagtgtcctgaagcatgattttaatagcccttaacattaactttctggtgcgatgcgcgcagcaacgcattcttatttcacttagattaatacagtaggtacagcacattatcacaatattgtttaataaaccataattaaaagcactccagccaaaactcatatctgatataatcgcccctgcatgaccatcataccaaagtttaatataaattaaatgacgttccctcaaaaacacactacccacatacatgatctcttttggcatgtgcatattaacaatctgtctgtaccatggacaacgttggttaatcatgcagcccaatataaccttccggaaccacactgccaacaccgctcccccagccatgcattgaagtgaaccctgctgattacaatgacaatgaagaatccaattctctcgaccgtgaatcacttgagaatgaaaaatatctatagtagcacaacatagacataaatgcatgatcgcaggtg

SEQ ID NO: 54 - DNA, 827 bp, synthetic construct
  misc_feature 1..827: note = segment 3-12
  source 1..827: mol_type = other DNA
cacctgcgatcgcatgcatcttctcataatttttaactcctcaggatttagaaacatatcccaaggaataggaagctcttgcagaacagtaaagctggcagaacaaggaagaccacgaacacaacttacactatgcatagtcatagtatcacaatctggcaacagcgggtggtcttcagtcatagaagctcgggtttcattttcctcacaacgtggtaactgggctctggtgtaaggatgatgtctggcgcatgatgtcgagcgtgcgcacaaccttgtcataatggagttgcttcctgacattctcgtattttgtatagcaaaacgcggccctggcagaacacactcttcttcgccttttatcctgccgcttagcgtgttccgtgtgatagttcaagtacagccacactcttaagttggtcaaaagaatgctggcttcagttgtaatcaaaactccatcacatctaatcgttctgaggaaatgatccacggtagcatatgcaaatcccaaccaagcaatgcaactggattgcgtttcaagcaggagaggagagggaagagacggaagaaccatgttaatttttattccaaacgatctcgcagtacttcaaattgtagatcgcgcagatggcatctgtcgcccccactgtgttggtgaaaaagcacagctagatcaaaagaaatgcgattttcaaggtgctcaacggtggcttccagcaaagcctccacgcgcacatccaagaacaaaagaataccaaaagaaggagcattttctaactcctcaatcatcatattacagtcctgcaccattcccaggatcgcaggtg

SEQ ID NO: 55 - DNA, 838 bp, synthetic construct
  misc_feature 1..838: note = segment 3-13
  source 1..838: mol_type = other DNA
cacctgcgatcccagataattttcagctttccagccttggattattcgtgtcatttcttgtggtaaatccaatccacacattacaaacaggtcccggagggcgccctccaccaccattcttaaacacaccctcataatgacaaaatatcttgctcctgtgtcacctgtagcaaattgagaatggcaacatcaattgacatgccgttggctctaagttcttctctaagttctagttgtaaatactctttcatattatcaccaaactgcttagccagaagccccccgggaacaagagcaggacacgctacagtgcagtacaagcgcagacctccccaattggctccagcaaaaacaagattggaataagcatattgggaaccaccagtaatgtcatcaaagttgctggaaatataatcaggcagagtttgttgtaaaaattgaataaaagaaaaatttgccaaaaaaacattcaaaacctctgggatgcaaatgcaataagttaccgcgctgcgctccaacattgttagttttgaatgagtctgcaaaaaataaaaaaacaagcgtcatatcagagtagcctgacgaacaggtggataaatcagtctttccatcacaagacaagccacagggtctccagcccgaccctcgtaaaacctgtcatcgtgattaaacaacagcaccgaaagttcctcgcggtgaccagcatgaataattcttgatgaagcatacaatccaaacatgttagcatcagttaaagacaaaaaacagccaatatagcctctgggtataattatgcttaatcgtaaatatagcaaagccacccctcggatcgcaggtg

SEQ ID NO: 56 - DNA, 828 bp, synthetic construct
  misc_feature 1..828: note = segment 3-14
  source 1..828: mol_type = other DNA
cacctgcgatcctcgcggatacaaagtaaaaggcacaggagaataaaaaatataattattcctttgctgctgttcaggcaacgtcgcccccggtccctctaaatacacatacaaagcctcatcagccatggcttaccagacaaagtacagcaggcacacaaagcacaagctctaaagtcactcaccaacctgtccacagtatatatacacaaaccctaaactgacgtaatggggctaaagtacacaaaatcccgccaaacccaacacacaccccgaaactgcgtcaccacaaaagtacagtttcacttccgcaatcccaacaagcggcacttcctctttctcacgggacgtcacatccgcttaacttgcaaccggcctatgtggccggaggggtggagtcgtgacgtgaattacgtcatagggttagggaggtcctgtattagaggtcacgtgagtgttttgcgacattttgcgacaccatgtggtcacgctgggtatttaagcccgagtgagcacgcagggtctccattttgaagcgggaggtttgaacgcgcagccgccatgccggggttttacgagattgtgattaaggtccccagcgaccttgacgagcatctgcccggcatttctgacagctttgtgaactgggtggccgagaaggaatgggagttgccgccagattctgacatggatctgaatctgattgagcaggcacccctgaccgtggccgagaagctgcagcgcgactttctgacggaatggcgccgtgtgagtaaggctccggaggcccttttctttgtgcaatttgagaagggaggatcgcaggtg

SEQ ID NO: 57 - DNA, 824 bp, synthetic construct
  misc_feature 1..824: note = segment 3-15
  source 1..824: mol_type = other DNA
ggtctcgggagagagctacttccacatgcacgtgctcgtggaaaccaccggggtgaaatccatggttttgggacgtttcctgagtcagattcgcgaaaaactgattcagagaatttaccgcgggatcgagccgactttgccaaactggttcgcggtcacaaagaccagaaatggcgccggaggcgggaacaaggtggtggatgagtgctacatccccaattacttgctccccaaaacccagcctgagctccagtgggcgtggactaatatggaacagtatttaagcgcctgtttgaatctcacggagcgtaaacggttggtggcgcagcatctgacgcacgtgtcgcagacgcaggagcagaacaaagagaatcagaatcccaattctgatgcgccggtgatcagatcaaaaacttcagccaggtacatggagctggtcgggtggctcgtggacaaggggattacctcggagaagcagtggatccaggaggaccaggcctcatacatctccttcaatgcggcctccaactcgcggtcccaaatcaaggctgccttggacaatgcgggaaagattatgagcctgactaaaaccgcccccgactacctggtgggccagcagcccgtggaggacatttccagcaatcggatttataaaattttggaactaaacgggtacgatccccaatatgcggcttccgtctttctgggatgggccacgaaaaagttcggcaagaggaacaccatctggctgtttgggcctgcaactaccgggaagaccaacatcgcggaggccatagcccacactgtgcccttctacggagacc

SEQ ID NO: 58 - DNA, 849 bp, synthetic construct
  misc_feature 1..849: note = segment 3-16
  source 1..849: mol_type = other DNA
ggtctcgctacgggtgcgtaaactggaccaatgagaactttcccttcaacgactgtgtcgacaagatggtgatctggtgggaggaggggaagatgaccgccaaggtcgtggagtcggccaaagccattctcggaggaagcaaggtgcgcgtggaccagaaatgcaagtcctcggcccagatagacccgactcccgtgatcgtcacctccaacaccaacatgtgcgccgtgattgacgggaactcaacgaccttcgaacaccagcagccgttgcaagaccggatgttcaaatttgaactcacccgccgtctggatcatgactttgggaaggtcaccaagcaggaagtcaaagactttttccggtgggcaaaggatcacgtggttgaggtggagcatgaattctacgtcaaaaagggtggagccaagaaaagacccgcccccagtgacgcagatataagtgagcccaaacgggtgcgcgagtcagttgcgcagccatcgacgtcagacgcggaagcttcgatcaactacgcagacaggtaccaaaacaaatgttctcgtcacgtgggcatgaatctgatgctgtttccctgcagacaatgcgagagaatgaatcagaattcaaatatctgcttcactcacggacagaaagactgtttagagtgctttcccgtgtcagaatctcaacccgtttctgtcgtcaaaaaggcgtatcagaaactgtgctacattcatcatatcatgggaaaggtgccagacgcttgcactgcctgcgatctggtcaatgtggatttggatgactgcatctttgaacaataaatgatttaaatcaggtggcctctatggggagacc

SEQ ID NO: 59 - DNA, 865 bp, synthetic construct; identical to SEQ ID NO: 22
  misc_feature 1..865: note = segment 3-17
  source 1..865: mol_type = other DNA

SEQ ID NO: 60 - DNA, 871 bp, synthetic construct; identical to SEQ ID NO: 23
  misc_feature 1..871: note = segment 3-18
  source 1..871: mol_type = other DNA

SEQ ID NO: 61 - DNA, 872 bp, synthetic construct; identical to SEQ ID NO: 24
  misc_feature 1..872: note = segment 3-19
  source 1..872: mol_type = other DNA

SEQ ID NO: 62 - DNA, 870 bp, synthetic construct
  misc_feature 1..870: note = segment 4-1
  source 1..870: mol_type = other DNA
cacctgcgatcattagcggccgcttggccactccctctatgcgcactcgctcgctcggtggggcctggcgaccaaaggtcgccagacggacgtgctttgcacgtccggccccaccgagcgagcgagtgcgcatagagggagtggccaactccatcactagaggtatggcggccttgatggccaattcgattcgattagggcctacttggcctaatagtaatcaattacggggtcattagttcatagcccatatatggagttccgcgttacataacttacggtaaatggcccgcctggctgaccgcccaacgacccccgcccattgacgtcaataatgacgtatgttcccatagtaacgccaatagggactttccattgacgtcaatgggtggagtatttacggtaaactgcccacttggcagtacatcaagtgtatcatatgccaagtacgccccctattgacgtcaatgacggtaaatggcccgcctggcattatgcccagtacatgaccttatgggactttcctacttggcagtacatctacgtattagtcatcgctattaccatggtgatgcggttttggcagtacatcaatgggcgtggatagcggtttgactcacggggatttccaagtctccaccccattgacgtcaatgggagtttgttttggcaccaaaatcaacgggactttccaaaatgtcgtaacaactccgccccattgacgcaaatgggcggtaggcgtgtacggtgggaggtctatataagcagagctggtttagtgaaccgtcagatgccaccatggtgagcaagggcgaggagctgttcaccggggtggtgcccatcctggtcgagctggacggatcgcaggtg

SEQ ID NO: 63 - DNA, 870 bp, synthetic construct; identical to SEQ ID NO: 7
  misc_feature 1..870: note = segment 4-2
  source 1..870: mol_type = other DNA

SEQ ID NO: 64 - DNA, 867 bp, synthetic construct
  misc_feature 1..867: note = segment 4-3
  source 1..867: mol_type = other DNA
cacctgcgatccctgtagggcctgcggggtctattgggaaccaagctggagtgcagtggcacaatcttggctcactgcaatctccgcctcctgggttcaagcgattctcctgcctcagcctcccgagttgttgggattccaggcatgcatgaccaggctcagctaatttttgtttttttggtagagacggggtttcaccatattggccaggctggtctccaactcctaatctcaggtgatctacccaccttggcctcccaaattgctgggattacaggcgtgaaccactgctcccttccctgtccttgccatacctctagtgatggagttggccactccctctatgcgcactcgctcgctcggtggggcctggcgaccaaaggtcgccagacggacgtgctttgcacgtccggccccaccgagcgagcgagtgcgcatagagggagtggccaaggcctgattggccgtagatgtacctggacatccaggtgatgccggcggcggtggtggaggcgcgcggaaagtcgcggacgcggttccagatgttgcgcagcggcaaaaagtgctccatggtcgggacgctctggccggtcaggcgcgcgcaatcgttgacgctctagaccgtgcaaaaggagagcctgtaagcgggcactcttccgtggtctggtggataaattcgcaagggtatcatggcggacgaccggggttcgagccccgtatccggccgtccgccgtgatccatgcggttaccgcccgcgtgtcgaacccaggtgtgcgacgtcagacaacgggggagtgctccttttggcttccttccaggcgcggcggctgctgcgctagcttttttggccactgggatcgcaggtg

SEQ ID NO: 65 - DNA, 861 bp, synthetic construct
  misc_feature 1..861: note = segment 4-4
  source 1..861: mol_type = other DNA
cgtctcgctggccgcgcgcagcgtaagcggttaggctggaaagcgaaagcattaagtggctcgctccctgtagccggagggttattttccaagggttgagtcgcgggacccccggttcgagtctcggaccggccggactgcggcgaacgggggtttgcctccccgtcatgcaagaccccgcttgcaaattcctccggaaacagggacgagccccttttttgcttttcccagatgcatccggtgctgcggcagatgcgcccccctcctcagcagcggcaagagcaagagcagcggcagacatgcagggcaccctcccctcctcctaccgcgtggtacccaactccatgctcaacagtccccaggtacagcccaccctgcgtcgcaaccaggaacagctctacagcttcctggagcgccactcgccctacttccgcagccacagtgcgcagattaggagcgccacttctttttgtcacttgaaaaacatgtaaaaataatgtactagagacactttcaataaaggcaaatgcttttatttgtacactctcgggtgattatttacccccacccttgccgtctgcgccgtttaaaaatcaaaggggttctgccgcgcatcgctatgcgccactggcagggacacgttgcgatactggtgtttagtgctccacttaaactcaggcacaaccatccgcggcagctcggtgaagttttcactccacaggctgcgcaccatcaccaacgcgtttagcaggtcgggcgccgatatcttgaagtcgcagttggggcctccgccctgcgcgcgcgagttgcgatacacagggttgcagcactggaacactatcagcgccgggtggggagacg

SEQ ID NO: 66 - DNA, 865 bp, synthetic construct
  misc_feature 1..865: note = segment 4-5
  source 1..865: mol_type = other DNA
cacctgcgatcgtggtgcacgctggccagcacgctcttgtcggagatcagatccgcgtccaggtcctccgcgttgctcagggcgaacggagtcaactttggtagctgccttcccaaaaagggcgcgtgcccaggctttgagttgcactcgcaccgtagtggcatcaaaaggtgaccgtgcccggtctgggcgttaggatacagcgcctgcataaaagccttgatctgcttaaaagccacctgagcctttgcgccttcagagaagaacatgccgcaagacttgccggaaaactgattggcaggacaggccgcgtcgtgcacgcagcaccttgcgtcggtgttggagatctgcaccacatttcggccccaccggttcttcacgatcttggccttgctagactgctccttcagcgcgcgctgcccgttttcgctcgtcacatccatttcaatcacgtgctccttatttatcataatgcttccgtgtagacacttaagctcgccttcgatctcagcgcagcggtgcagccacaacgcgcagcccgtgggctcgtgatgcttgtaggtcacctctgcaaacgactgcaggtacgcctgcaggaatcgccccatcatcgtcacaaaggtcttgttgctggtgaaggtcagctgcaacccgcggtgctcctcgttcagccaggtcttgcatacggccgccagagcttccacttggtcaggcagtagtttgaagttcgcctttagatcgttatccacgtggtacttgtccatcagcgcgcgcgcagcctccatgcccttctcccacgcagacacgatcggcacactcagcgggttcatcaccgtaatttcactttccgcttcgatcgcaggtg

SEQ ID NO: 67 - DNA, 867 bp, synthetic construct
  misc_feature 1..867: note = segment 4-6
  source 1..867: mol_type = other DNA
cacctgcgatccttcgctgggctcttcctcttcctcttgcgtccgcataccacgcgccactgggtcgtcttcattcagccgccgcactgtgcgcttacctcctttgccatgcttgattagcaccggtgggttgctgaaacccaccatttgtagcgccacatcttctctttcttcctcgctgtccacgattacctctggtgatggcgggcgctcgggcttgggagaagggcgcttctttttcttcttgggcgcaatggccaaatccgccgccgaggtcgatggccgcgggctgggtgtgcgcggcaccagcgcgtcttgtgatgagtcttcctcgtcctcggactcgatacgccgcctcatccgcttttttgggggcgcccggggaggcggcggcgacggggacggggacgacacgtcctccatggttgggggacgtcgcgccgcaccgcgtccgcgctcgggggtggtttcgcgctgctcctcttcccgactggccatttccttctcctataggcagaaaaagatcatggagtcagtcgagaagaaggacagcctaaccgccccctctgagttcgccaccaccgcctccaccgatgccgccaacgcgcctaccaccttccccgtcgaggcacccccgcttgaggaggaggaagtgattatcgagcaggacccaggttttgtaagcgaagacgacgaggaccgctcagtaccaacagaggataaaaagcaagaccaggacaacgcagaggcaaacgaggaacaagtcgggcggggggacgaaaggcatggcgactacctagatgtgggagacgacgtgctgttgaagcatctgcagcgccagtgcgccattatctgcgatcgcaggtg

SEQ ID NO: 68 - DNA, 856 bp, synthetic construct
  misc_feature 1..856: note = segment 4-7
  source 1..856: mol_type = other DNA
cgtctcgctgcgacgcgttgcaagagcgcagcgatgtgcccctcgccatagcggatgtcagccttgcctacgaacgccacctattctcaccgcgcgtaccccccaaacgccaagaaaacggcacatgcgagcccaacccgcgcctcaacttctaccccgtatttgccgtgccagaggtgcttgccacctatcacatctttttccaaaactgcaagatacccctatcctgccgtgccaaccgcagccgagcggacaagcagctggccttgcggcagggcgctgtcatacctgatatcgcctcgctcaacgaagtgccaaaaatctttgagggtcttggacgcgacgagaagcgcgcggcaaacgctctgcaacaggaaaacagcgaaaatgaaagtcactctggagtgttggtggaactcgagggtgacaacgcgcgcctagccgtactaaaacgcagcatcgaggtcacccactttgcctacccggcacttaacctaccccccaaggtcatgagcacagtcatgagtgagctgatcgtgcgccgtgcgcagcccctggagagggatgcaaatttgcaagaacaaacagaggagggcctacccgcagttggcgacgagcagctagcgcgctggcttcaaacgcgcgagcctgccgacttggaggagcgacgcaaactaatgatggccgcagtgctcgttaccgtggagcttgagtgcatgcagcggttctttgctgacccggagatgcagcgcaagctagaggaaacattgcactacacctttcgacagggctacgtacgccaggcctgcaagatctccaacgtggagctctgcaacctggtctcctaccggagacg

SEQ ID NO: 69 - DNA, 856 bp, synthetic construct
  misc_feature 1..856: note = segment 4-8
  source 1..856: mol_type = other DNA
cgtctcgtaccttggaattttgcacgaaaaccgccttgggcaaaacgtgcttcattccacgctcaagggcgaggcgcgccgcgactacgtccgcgactgcgtttacttatttctatgctacacctggcagacggccatgggcgtttggcagcagtgcttggaggagtgcaacctcaaggagctgcagaaactgctaaagcaaaacttgaaggacctatggacggccttcaacgagcgctccgtggccgcgcacctggcggacatcattttccccgaacgcctgcttaaaaccctgcaacagggtctgccagacttcaccagtcaaagcatgttgcagaactttaggaactttatcctagagcgctcaggaatcttgcccgccacctgctgtgcacttcctagcgactttgtgcccattaagtaccgcgaatgccctccgccgctttggggccactgctaccttctgcagctagccaactaccttgcctaccactctgacataatggaagacgtgagcggtgacggtctactggagtgtcactgtcgctgcaacctatgcaccccgcaccgctccctggtttgcaattcgcagctgcttaacgaaagtcaaattatcggtacctttgagctgcagggtccctcgcctgacgaaaagtccgcggctccggggttgaaactcactccggggctgtggacgtcggcttaccttcgcaaatttgtacctgaggactaccacgcccacgagattaggttctacgaagaccaatcccgcccgccaaatgcggagcttaccgcctgcgtcattacccagggccacattcttggccaattgcaagccatcaacaaagcggagacg

SEQ ID NO: 70 - DNA, 866 bp, synthetic construct
  misc_feature 1..866: note = segment 4-9
  source 1..866: mol_type = other DNA
cacctgcgatcaagcccgccaagagtttctgctacgaaagggacggggggtttacttggacccccagtccggcgaggagctcaacccaatccccccgccgccgcagccctatcagcagcagccgcgggcccttgcttcccaggatggcacccaaaaagaagctgcagctgccgccgccacccacggacgaggaggaatactgggacagtcaggcagaggaggttttggacgaggaggaggaggacatgatggaagactgggagagcctagacgaggaagcttccgaggtcgaagaggtgtcagacgaaacaccgtcaccctcggtcgcattcccctcgccggcgccccagaaatcggcaaccggttccagcatggctacaacctccgctcctcaggcgccgccggcactgcccgttcgccgacccaaccgtagatgggacaccactggaaccagggccggtaagtccaagcagccgccgccgttagcccaagagcaacaacagcgccaaggctaccgctcatggcgcgggcacaagaacgccatagttgcttgcttgcaagactgtgggggcaacatctccttcgcccgccgctttcttctctaccatcacggcgtggccttcccccgtaacatcctgcattactaccgtcatctctacagcccatactgcaccggcggcagcggcagcggcagcaacagcagcggccacacagaagcaaaggcgaccggatagcaagactctgacaaagcccaagaaatccacagcggcggcagcagcaggaggaggagcgctgcgtctggcgcccaacgaacccgtatcgacccgcgagcttagaaacaggatttttcccactgatcgcaggtg

SEQ ID NO: 71 - DNA, 868 bp, synthetic construct
  misc_feature 1..868: note = segment 4-10
  source 1..868: mol_type = other DNA
cacctgcgatccactctgtatgctatatttcaacagagcaggggccaagaacaagagctgaaaataaaaaacaggtctctgcgatccctcacccgcagctgcctgtatcacaaaagcgaagatcagcttcggcgcacgctggaagacgcggaggctctcttcagtaaatactgcgcgctgactcttaaggactagtttcgcgccctttctcaaatttaagcgcgaaaactacgtcatctccagcggccacacccggcgccagcacctgtcgtcagcgccattatgagcaaggaaattcccacgccctacatgtggagttaccagccacaaatgggacttgcggctggagctgcccaagactactcaacccgaataaactacatgagcgcgggaccccacatgatatcccgggtcaacggaatccgcgcccaccgaaaccgaattctcttggaacaggcggctattaccaccacacctcgtaataaccttaatccccgtagttggcccgctgccctggtgtaccaggaaagtcccgctcccaccactgtggtacttcccagagacgcccaggccgaagttcagatgactaactcaggggcgcagcttgcgggcggctttcgtcacagggtgcggtcgcccgggcactaaacggtacacaggaaacaggagacacaactccaagtgcatactctatgtcattttcatgggactggtctggccacaactacattaatgaaatatttgccacatcctcttacactttttcatacattgcccaagaataaagaatcgtttgtgttatgtttcaacgtgtttatttttcaattgcagaaaatttcaagtcatttttcattcaggatcgcaggtg

SEQ ID NO: 72 - DNA, 858 bp, synthetic construct
  misc_feature 1..858: note = segment 4-11
  source 1..858: mol_type = other DNA
cgtctcgtcagtagtatagccccaccaccacatagcttatacagatcaccgtaccttaatcaaactcacagaaccctagtattcaacctgccacctccctcccaacacacagagtacacagtcctttctccccggctggccttaaaaagcatcatatcatgggtaacagacatattcttaggtgttatattccacacggtttcctgtcgagccaaacgctcatcagtgatattaataaactccccgggcagctcacttaagttcatgtcgctgtccagctgctgagccacaggctgctgtccaacttgcggttgcttaacgggcggcgaaggagaagtccacgcctacatgggggtagagtcataatcgtgcatcaggatagggcggtggtgctgcagcagcgcgcgaataaactgctgccgccgccgctccgtcctgcaggaatacaacatggcagtggtctcctcagcgatgattcgcaccgcccgcagcataaggcgccttgtcctccgggcacagcagcgcaccctgatctcacttaaatcagcacagtaactgcagcacagcaccacaatattgttcaaaatcccacagtgcaaggcgctgtatccaaagctcatggcggggaccacagaacccacgtggccatcataccacaagcgcaggtagattaagtggcgacccctcataaacacgctggacataaacattacctcttttggcatgttgtaattcaccacctcccggtaccatataaacctctgattaaacatggcgccatccaccaccatcctaaaccagctggccaaaacctgcccgccggctatacactgcagggaaccgggactggaggagacg

SEQ ID NO: 73 - DNA, 868 bp, synthetic construct
  misc_feature 1..868: note = segment 4-12
  source 1..868: mol_type = other DNA
cacctgcgatctggaacaatgacagtggagagcccaggactcgtaaccatggatcatcatgctcgtcatgatatcaatgttggcacaacacaggcacacgtgcatacacttcctcaggattacaagctcctcccgcgttagaaccatatcccagggaacaacccattcctgaatcagcgtaaatcccacactgcagggaagacctcgcacgtaactcacgttgtgcattgtcaaagtgttacattcgggcagcagcggatgatcctccagtatggtagcgcgggtttctgtctcaaaaggaggtagacgatccctactgtacggagtgcgccgagacaaccgagatcgtgttggtcgtagtgtcatgccaaatggaacgccggacgtagtcatatttcctgaagcaaaaccaggtgcgggcgtgacaaacagatctgcgtctccggtctcgccgcttagatcgctctgtgtagtagttgtagtatatccactctctcaaagcatccaggcgccccctggcttcgggttctatgtaaactccttcatgcgccgctgccctgataacatccaccaccgcagaataagccacacccagccaacctacacattcgttctgcgagtcacacacgggaggagcgggaagagctggaagaaccatgtttttttttttattccaaaagattatccaaaacctcaaaatgaagatctattaagtgaacgcgctcccctccggtggcgtggtcaaactctacagccaaagaacagataatggcatttgtaagatgttgcacaatggcttccaaaaggcaaacggccctcacgtccaagtggacgtaaaggctaaacccttcagggtggatcgcaggtg

SEQ ID NO: 74 - DNA, 858 bp, synthetic construct
  misc_feature 1..858: note = segment 4-13
  source 1..858: mol_type = other DNA
cgtctcgggtgaatctcctctataaacattccagcaccttcaaccatgcccaaataattctcatctcgccaccttctcaatatatctctaagcaaatcccgaatattaagtccggccattgtaaaaatctgctccagagcgccctccaccttcagcctcaagcagcgaatcatgattgcaaaaattcaggttcctcacagacctgtataagattcaaaagcggaacattaacaaaaataccgcgatcccgtaggtcccttcgcagggccagctgaacataatcgtgcaggtctgcacggaccagcgcggccacttccccgccaggaaccatgacaaaagaacccacactgattatgacacgcatactcggagctatgctaaccagcgtagccccgatgtaagcttgttgcatgggcggcgatataaaatgcaaggtgctgctcaaaaaatcaggcaaagcctcgcgcaaaaaagaaagcacatcgtagtcatgctcatgcagataaaggcaggtaagctccggaaccaccacagaaaaagacaccatttttctctcaaacatgtctgcgggtttctgcataaacacaaaataaaataacaaaaaaacatttaaacattagaagcctgtcttacaacaggaaaaacaacccttataagcataagacggactacggccatgccggcgtgaccgtaaaaaaactggtcaccgtgattaaaaagcaccaccgacagctcctcggtcatgtccggagtcataatgtaagactcggtaaacacatcaggttgattcacatcggtcagtgctaaaaagcgaccgaaatagcccgggggaatacatacccgcaggcgtaggagacg

SEQ ID NO: 75 - DNA, 854 bp, synthetic construct
  misc_feature 1..854: note = segment 4-14
  source 1..854: mol_type = other DNA
cgtctcgcgtagagacaacattacagcccccataggaggtataacaaaattaataggagagaaaaacacataaacacctgaaaaaccctcctgcctaggcaaaatagcaccctcccgctccagaacaacatacagcgcttccacagcggcagccataacagtcagccttaccagtaaaaaagaaaacctattaaaaaaacaccactcgacacggcaccagctcaatcagtcacagtgtaaaaaagggccaagtgcagagcgagtatatataggactaaaaaatgacgtaacggttaaagtccacaaaaaacacccagaaaaccgcacgcgaacctacgcccagaaacgaaagccaaaaaacccacaacttcctcaaatcgtcacttccgttttcccacgttacgtaacttcccattttaagaaaactacaattcccaacacatacaagttactccgccctaaaacggcctatgtggccagtgacgtaacgcgaagcgcgcgaagcgagaccacgcctaccagctgcgtcagcagtcaggtgacccttttgcgacagtttgcgacaccacgtggccgctgagggtatatattctcgagtgagcgaaccaggagctccattttgaccgcgaaatttgaacgagcagcagccatgccggggttctacgagattgtcctgaaggtcccgagtgacctggacgagcgcctgccgggcatttctaactcgtttgttaactgggtggccgagaaggaatgggacgtgccgccggattctgacatggatccgaatctgattgagcaggcacccctgaccgtggccgaaaagcttcagcgcgagttcctggtggagggagacg

SEQ ID NO: 76 - DNA, 855 bp, synthetic construct
  misc_feature 1..855: note = segment 4-15
  source 1..855: mol_type = other DNA
cgtctcgggagtggcgccgcgtgagtaaggctccggaggccctcttttttgtccagttcgaaaagggggagacctacttccacctgcacgtgctgattgagaccatcggggtcaaatccatggtggtcggccgctacgtgagccagattaaagagaagctggtgacccgcatctaccgcggggtcgagccgcagcttccgaactggttcgcggtgaccaaaacgcgaaatggcgccgggggcgggaacaaggtggtggacgactgctacatccccaactacctgctccccaagacccagcccgagctccagtgggcgtggactaacatggaccagtatttaagcgcctgtttgaatctcgcggagcgtaaacggctggtggcgcagcatctgacgcacgtgtcgcagacgcaggagcagaacaaagagaatcagaaccccaattctgacgcgccggtcatcaggtcaaaaacctcagccaggtacatggagctggtcgggtggctggtggaccgcgggatcacgtcagaaaagcaatggattcaggaggaccaggcctcgtacatctccttcaacgccgcctccaactcgcggtcccagatcaaggccgcgctggacaatgcctccaagatcatgagcctgacaaagacggctccggactacctggtgggcagcaacccgccggaggacattaccaaaaatcggatctaccaaatcctggagctgaacgggtacgatccgcagtacgcggcctccgtcttcctgggctgggcgcaaaagaagttcgggaagaggaacaccatctggctctttgggccggccacgacgggtaaaaccaacatcgcggaaggagacg

SEQ ID NO: 77 - DNA, 893 bp, synthetic construct
  misc_feature 1..893: note = segment 4-16
  source 1..893: mol_type = other DNA
cacctgcgatcggaagccatcgcccacgccgtgcccttctacggctgcgtaaactggaccaatgagaactttcccttcaacgattgcgtcgacaagatggtgatctggtgggaggagggcaagatgacggccaaggtcgtggagagcgccaaggccattctgggcggaagcaaggtgcgcgtggaccaaaagtgcaagtcatcggcccagatcgaacccactcccgtgatcgtcacctccaacaccaacatgtgcgccgtgattgacgggaacagcaccaccttcgagcatcagcagccgctgcaggaccggatgtttgaatttgaacttacccgccgtttggaccatgactttgggaaggtcaccaaacaggaagtaaaggactttttccggtgggcttccgatcacgtgactgacgtggctcatgagttctacgtcagaaagggtggagctaagaaacgccccgcctccaatgacgcggatgtaagcgagccaaaacgggagtgcacgtcacttgcgcagccgacaacgtcagacgcggaagcaccggcggactacgcggacaggtaccaaaacaaatgttctcgtcacgtgggcatgaatctgatgctttttccctgtaaaacatgcgagagaatgaatcaaatttccaatgtctgttttacgcatggtcaaagagactgtggggaatgcttccctggaatgtcagaatctcaacccgtttctgtcgtcaaaaagaagacttatcagaaactgtgtccaattcatcatatcctgggaagggcacccgagattgcctgttcggcctgcgatttggccaatgtggacttggatgactgtgtttctgagcaataaatgacttaaaccaggtggcctctatgggatcgcaggtg

SEQ ID NO: 78 - DNA, 865 bp, synthetic construct; identical to SEQ ID NO: 22
  misc_feature 1..865: note = segment 4-17
  source 1..865: mol_type = other DNA

SEQ ID NO: 79 - DNA, 871 bp, synthetic construct; identical to SEQ ID NO: 23
  misc_feature 1..871: note = segment 4-18
  source 1..871: mol_type = other DNA

SEQ ID NO: 80 - DNA, 872 bp, synthetic construct; identical to SEQ ID NO: 24
  misc_feature 1..872: note = segment 4-19
  source 1..872: mol_type = other DNA

SEQ ID NO: 81 - DNA, 860 bp, synthetic construct
  misc_feature 1..860: note = segment 5-1
  source 1..860: mol_type = other DNA
cacctgcgatcattagcggccgcttggccactccctctatgcgcgctcgctcactcactcggccctggagaccaaaggtctccagaggccggcagtctctgccggccggccgagtgagtgagcgagcgcgcatagagggagtggccaactccatcatctggccttgatggccaattcgattcgattagggcctacttggcctaatagtaatcaattacggggtcattagttcatagcccatatatggagttccgcgttacataacttacggtaaatggcccgcctggctgaccgcccaacgacccccgcccattgacgtcaataatgacgtatgttcccatagtaacgccaatagggactttccattgacgtcaatgggtggagtatttacggtaaactgcccacttggcagtacatcaagtgtatcatatgccaagtacgccccctattgacgtcaatgacggtaaatggcccgcctggcattatgcccagtacatgaccttatgggactttcctacttggcagtacatctacgtattagtcatcgctattaccatggtgatgcggttttggcagtacatcaatgggcgtggatagcggtttgactcacggggatttccaagtctccaccccattgacgtcaatgggagtttgttttggcaccaaaatcaacgggactttccaaaatgtcgtaacaactccgccccattgacgcaaatgggcggtaggcgtgtacggtgggaggtctatataagcagagctggtttagtgaaccgtcagatgccaccatggtgagcaagggcgaggagctgttcaccggggtggtgcccatcctggtcgagctggacggatcgcaggtg

SEQ ID NO: 82 - DNA, 870 bp, synthetic construct; identical to SEQ ID NO: 7
  misc_feature 1..870: note = segment 5-2
  source 1..870: mol_type = other DNA

SEQ ID NO: 83 - DNA, 884 bp, synthetic construct
  misc_feature 1..884: note = segment 5-3
  source 1..884: mol_type = other DNA
cacctgcgatccctgtagggcctgcggggtctattgggaaccaagctggagtgcagtggcacaatcttggctcactgcaatctccgcctcctgggttcaagcgattctcctgcctcagcctcccgagttgttgggattccaggcatgcatgaccaggctcagctaatttttgtttttttggtagagacggggtttcaccatattggccaggctggtctccaactcctaatctcaggtgatctacccaccttggcctcccaaattgctgggattacaggcgtgaaccactgctcccttccctgtccttagatgatggagttggccacattagctatgcgcgctcgctcactcactcggccctggagaccaaaggtctccagaggccggcagtctctgccggccggccgagtgagtgagcgagcgcgcatagagggagtggccaaggcctgattggccgtagaggtagcgggacatccaggtgatgccggcggcggtggtggaggcgcgcggaaactcgcggacgcggttccagatgttgcgcagcggtaggaaataatccatggtcggcacggtctggccggtaagacgtgcgcagtcattgacgctctagaggcaaaaacgaaagcggttgagcaggctcttcctccgtagcctggcggaacgcaaacgggttaggccgcgcgtgtaccccggttcgagtcccctcgaatcaggctaaagccgcgactaacgtggtattggcactcccgtctcgacccaagcccgatagccgccaggatacggtgaagagcctttttgccggccgagtggggtcgctagatttgaaagcggttaaaaaccccgctgggtagtggctcgcgcccgtagtctggagatcgcaggtg

SEQ ID NO: 84 - DNA, 877 bp, synthetic construct
  misc_feature 1..877: note = segment 5-4
  source 1..877: mol_type = other DNA
cgtctcgtggacaagcatcactagggttaagttacagcagaacccggttcgcggacggccgcggcaagcgggacttagttaccccgccaatttaaagacccgcagccagccgacttttccagttacgggagcgagcccccttttttctttttgccagatgcatcccgtcctgcgccaaatgcgtcccacccccccggcgaccaccgcaaccgcggccgtagcaggcgccggcgctgtacaacagcagacagagatggatgaacttgctgacgggggtgcccaatggcatgctacaatcgccacaggtactgcccaccctccggcgcaaccaggagaagctctaccgcttccttgcgcaccactccccctactttcgctcccaccgcgccgccatcgaacacgccaccgcttttgataaaatgaaacaactgcgtgtataactcaaataaacagcacttttattttacatgcactggagtatatgcaagttatttaaaagtcaaaggggttctcgcgctcgtcgttgtgcgccgcgctgggaagggccacgttgcggtactggtacttgggctgccacttaaactcggggatcaccagtttaggaacagcaatctcggggaaggtctcgctccacatgcgccggctcatttgcagggcgcccagcatgtccggggcggaaatcttaaaatcgcagttgggaccggtgctttgcgcgcgcgagttgcggtacacagggttgcagcactggaacaccatcagactggggtactttacgctggccagcacgctcttatcgctaatttgatccttgtccaggtcctcggcgttgctcaggccgaacggggtcatcttacacagctggcggcccagggagacg

SEQ ID NO: 85 - DNA, 887 bp, synthetic construct
  misc_feature 1..887: note = segment 5-5
  source 1..887: mol_type = other DNA
cacctgcgatcccaggaagggcacgctgtggggcttgtggttacactcgcagtgcacgggcattagcatcattcccgcaccgcgctgcatattcgggtatagggccttaacaaaggccataatctgcttaaaagcttgctgggccttagctccctcgctaaaaaacaggccgcagcttttcccgctaaactggttatttccgcacccggcatcttgcacgcagcagcgcgcgtcatggctggtcagttgcaccacgcttctcccccagcggttctgggtcactttggccttgctgggttgctccttcaacgcgcgctgaccgttctcgctggtcacatccatctccaccacatggtccttgtggatcattaccgtcccgtgcagacacttaagctggccttccacctcggcacagccgtggtcccacagggcactgccggtgcactcccagtttttgtgcgcgatcccgctgtggctaaagatgtaaccttgcaacaggcgacccatcacggtgctaaagctcttctgggtggtaaaggtcagttgcatcccgcgggcctcctcgttcatccaggtctggcacattttttggaatatctcggtctgctccggcataagcttgtaagcattgcgcaggccgctgtcgacgcggtagcgttccatgagcacgtttatggtatccatgcccttctcccaggacgaaaccaaaggcagactcagggggttgcgcacgttcaaaataccaggggtcgcgggctcgacaatgcgttttccgtccttgccttccttcaacagaaccggcggctggctgaatcccactcccacgatcacggcatcttcctggggcatctcttcgtcggggtttaccttggtcacgatcgcaggtg

SEQ ID NO: 86 - DNA, 820 bp, synthetic construct
  misc_feature 1..820: note = segment 5-6
  source 1..820: mol_type = other DNA
cgtctcgtcacatgtttggtctttctgggctgcttcttttttggagggctgtccactggaaccacgtcctcctcggaagacccggagcccacccgctgatactttcggcgcttggtgggcagaggaggtagcggcggcgaggggctcctttcctgctccggcggatagcgcgccgacccgtggccccggggcggagtggcctctcggtccataaaccggcgcacgtcctgactgccgccggccattgtttcctaggggaagatggaggagcagccgcgtaagcaggagcaggaggaggagaacttaaccacccacgagcaacccaaaattgagcaggacctgggcttggaagagccggctcgtctagaacccccacacgatgaacaggagaagaccaacgctgggctggagcatggctacctaggaggacaggaggatgtgctgctaaaacacttgcagcgccagtcctttatcctccgggacgctctggccgaccgaagcaaaacccccctcagcgtccaggagctgtgtcgggcctacgagctcaacctcttctcgccgcgcgtgccccccaaacgccagcccaacggcacctgcgagcccaacccgcgtcttaacttctaccccgtctttgcggtccccgaggcccttgccacttatcacatattttttaaaaaccaaaaaatccccgtttcctgccgcgccaaccgcacccgcgccgacgcactcctcgctctggggcccggcgcgcgcatacctgatatcgcttccctggaagaggtgcccaagatctttgaagggcttggtcgggacggagacg

SEQ ID NO: 87 - DNA, 882 bp, synthetic construct
  misc_feature 1..882: note = segment 5-7
  source 1..882: mol_type = other DNA
cacctgcgatcggacgagacgcgcgcggcgaacgctctaaaagaaacagcagaggaaaagggttacactagcgccctggtagagttggaaggcgataacgccaggctggccgtgcttaagcgcagcgtcgagcttacccatttcgcctaccctgccgttaacctcccgcccaaggtcatgcgtcgcgtcatggatcagcttatcacgccccacattgaggcccttgatgaaagccaaaagcagcgccctgaggacgcccggcccgtggtcagcgacgaaatgcttgcgcgctggctcggaaaccgcgacccccagtccctggaggagcggcgtaagctcatgctggccgtggtcctggtcaccctcgagttggaatgcatgcgccgcttttttagcgaccccgaaaccctgcgcaaggttgaagagaccctgcactacactttcaggcacggctttgtcaggcaggcctgcaagatctctaacgtggagctaaccaacctggtctcctgcctgggtattttacacgagaaccgcctggggcagaccgtgcttcactcgaccctgaagggcgaggcgcggcgggactacatccgcgactgtgtctttctttttctttgccatacctggcagtcggccatgggcgtgtggcagcagtgtctccaggacgagaacctgaaggagctggacaagcttcttgctaaaaaccttaaaaagttatggacgggctttgacgagcgcaccgtcgcctcggacctggccgagattgtttttcctgaacgcctgaggcagacgcttaaaggcgggctgcccgactttatgagccagagcatgttgcaaaactaccgcacttttattctcgagcgatcgggaagatcgcaggtg

SEQ ID NO: 88 - DNA, 869 bp, synthetic construct
  misc_feature 1..869: note = segment 5-8
  source 1..869: mol_type = other DNA
cgtctcgggaatcctgcccgccacctgcaatgccttcccctccgactttgtcccgctgagctaccgccagtgtcccccgccgctgtggagccactgctacctcttgcagctggccaactacatcgcccaccactcagacgtgatcgaggacgtaagcggcgaggggctgcttgagtgccactgccgctgcaacctgtgctccccgcaccgctccctggtctgcaacccccagctcctaagcgagacccaggtcatcggtacctttgagctgcaaggtccggaaaactccaccactccgctgaaacttacgccggggttgtggacttccgcgtacctgcgcaaatttgtaccccaggactaccacgcccacgagataaagttctttgaggaccaattgtgcccacagcacgcggatcttacggcctgcgtcatcacccagggcgcaatcctcgcccaattgcacgccatccaaaaatcccgccaagagtttcttctaaaaaagggtaaaggggtttacctggacccccagacaggcgaagtgcttaacccgggtcttccccagcatgccgaggaagaagcaggagccactagtggaggagatggaagaagaatgggacagccaggcagaggaggacgaatgggaggaggaggaggaggaagaattggaagaggtgcaacaggagcaggcaacagagcagcccgtcgccgcaccatccgcgccggcagcccctccggtcaagcctcctcgtagatgggatcaagtgaagggtgacggtaagcaccagcggcagggctaccgatcatggagggcccacaaagccgcgatcattgcctgcttgcaagactgcggggggaacattgcggagacg

SEQ ID NO: 89 - DNA, 894 bp, synthetic construct
  misc_feature 1..894: note = segment 5-9
  source 1..894: mol_type = other DNA
cacctgcgatcttgcttttgcccgccgctacctgcttttccaccgcggggtaaacatcccccgcaacgtgttgcattactaccgtcaccttcacagctaacaaaaagcaagtaagaggagtcgccggaagaggaggcctcaggattgcggcggacgagcccttcaccaccagggagctaagaaaccgaatattccccactctttatgccatttttcagcagagtcgaggtcagcagcaagagcttaaagtaaaaaatcggtctctgcgctcgctcacccgcagttgcttgtaccacaaaaacgaagatcagctgcagcgcactcttgaagacgccgaggctttgtttcacaagtactgcgcgctcactcttaaagactaaggcgcgcccacccgaaaaaaaggcgggaattacctcatcgccagcaccatgagcaaggagattcccacgccttacatgtggagctatcagccccagatgggcctagccgcgggcgcctcccaggactactccacccgcatgaactggctcagtgccgggccctcaatgatctcacaggtcaacgggatccgtaaccatcgaaaccagatattgttggagcaggcggcagtcacctccacgcccagggcaaagcttaacccgcgtaattggccctccaccctggtgtaccaggaaattcccgggccaactaccgtactacttccgcgtgacgcactggccgaagtccgcatgactaactcaggtgtccagctggccggcggcgcttcccggtgcccgctccgcccacaataaactacctttaaccaggaaactggatgtgaatactctattacatttgattttagttgggccaaaacttatgtaaatgttgaatttgaaactacgatcgcaggtg

SEQ ID NO: 90 - DNA, 873 bp, synthetic construct
  misc_feature 1..873: note = segment 5-10
  source 1..873: mol_type = other DNA
cgtctcgctacctcttttaccttttcctatattgcccaagaataaaggataaataaacgtgtttttcatttaaaaatttcatgtatctttattgatttttacaccagcgcgggtacacattctcccaccaccagcccattttacagtgtaaacaattctctcagcacgggtggccttaaataggggaaagttctcattagtgcgggaactggacttggggtttataatccacacagtttcctggcgagccaaacgggggtcggtgattgagatgaagccgtcctttgaaaaatcatccaagtgggcctcgcagtccaaggtcacagtctggtggaatgagaagaacgcacagactcatactcggaaaacaaaatgggtctgtgcctctccatcagcgcccttaacagtctctgccgccggggctcggtgcggctgctacagatgggatcgggatcgcaagtctctttcactataatccccacagcctttagcattagtcttctggtgcgtcgggcacagcaccgcatcctaatctcgctcatgttttcacagtaagtgcagcacataatgaccatgttattcagcagcccataatttagggtgctccagccaaagcttatgttggaaatgatggaacccacgtgaccatcgtaccaaatgcggcagtatatcaggtgcctgccccttataaacacactgcccatatacataatctctttggacaagtttctatttacaatctgccggtaccaggggaagcgctggttgaacatgcacccgtaaatgactctcctaaaccacacggccagcagggtgcctcccgcccggcactgcagggagcccggggataaacagtggcaatgcagggagacg

SEQ ID NO: 91 - DNA, 870 bp, synthetic construct
  misc_feature 1..870: note = segment 5-11
  source 1..870: mol_type = other DNA
cgtctcggcaggatccagcgctcgtacccgcttaccatctgggctcttaccagatccagggtagcgggacacaggcacactgacatacatctttttaaaatttttatttcctttcgggtcaggatcatatcccaggggactggaaactcttggagcagggtaaaaccagcagcacatggtaatccacggacagaacttacattatgataatctgcatgatcacaatcgggcaatacagggtgttgttcagtcaaagaggccctggtctccttatcatatcgtggtaaacgggccctgcgatatggataatggcggagcaaggttgattgttccttggtgctcattgtagtgcaccctcttgcgtacctcgttgtacttttgccagcagaaagtggccctggaacagcaaatacctctcctccgaccgtcctttcgctgttgccgctcagtcatccaactgaagtacatccattcccaaaggttgtgaagaagttcctttgtatctaatgaaacaaaaagcccgtccatgcggattcccctcatcacatcagccaggactctgtaggccatccccatccagttaatgctgccttgtctatcatttaaagggggcggtggcaaaattggaagaaccatttttattccaaacggtctcgaaggacgataaagtgcaagtcacgcaggtgacagcgatcaccgccgctgtgttggtggaaacatacagccaggtcaaaacccactctattttcaaggtgctcgactgtggcttcgagcagtggctctacgcgtacatccagcataagaatcacattaaaagccggccctccatcgatttcatcaatcatcatgttacattcctgcacggagacg

SEQ ID NO: 92 - DNA, 877 bp, synthetic construct
  misc_feature 1..877: note = segment 5-12
  source 1..877: mol_type = other DNA
cgtctcggcaccatccccaggtaattctcatttttccagccttggattatttctacaaattgttggtgtaagtccactccgcacatgtggaaaagctcccatagcgccccctccactttcataatcaggcagaccttcataatagaaacaaatcctgctgctccaccacctgcagcgtgtttaaaacaacaacatttaataaggttctgccctcagcccttagctgacgtctaagtgtcagctgcaaaaagtcacttaagtcctgggccactacagctgacaattcagagccagggctaagcgtgggactggcaagcgtaagggagtactttaatgctccaaagctagcacctaaaaactgcatgctggaataagctctttttgtatctccggtaatgccttccaaaatgtgagtaataaagcgaggtagtttttctttaatcatgttagtaatagaaaaatcctctaaatacgtcactaggaccccagggaccacaatgtggtagcttacaccgcgtcgctgaagcatggttagtagagatgaaagtctgaaaaacaaaaagcatgcgctaaaccaaggtggctatttttactgaaggaaaaattactttttttagcagcagggtgcccactgggtggcccttgcggacatacaaaaattggtccgtgtgattaaaaagcagtacagcaagctcctgtcttctcccggcaaaaatcacatcggactgggttagtatgcccctggcatggtagtcatttaaagccataaatgtgccctgataaccagtaggaacgagtacactgacttttaggtaaaccaataccaccccatgcggaaaaatataaaaagaatcaggacaaaaaaaggtaggagacg

SEQ ID NO: 93 - DNA, 871 bp, synthetic construct
  misc_feature 1..871: note = segment 5-13
  source 1..871: mol_type = other DNA
cgtctcgggtatatttattgctagccccttcctggacgggagccatccctccagggctatctataaaagcatagagacattcagccatagcttagcccgcttaccagtagacaaagagcacagcagtacaagcgccaacagcaataactacttactgttccagctcagtacttaaaggcagcttacactgacgtaatgaccaaaggtgtaaaaaccccgccaaaaaaaaacacacacgccctaggtgtttttcgtaaaaacacttccgcgttctcacttcctcgtatcaattttgtgacttaacttccgggttcccacgttacgtcacttttgcccttacatgtgactgtgccatagggcgccattttcccgtgcccaatatggctaaagtccgcttttttatacgtcatcggccccgcgacttgcttccgggttgggccacgcctttgcggcaggcctatgtggcccagagagggagtggccaactccatcactaggggtagcgcgaagcgcctcccacgctgccgcgtcagcgctgacgtaaattacgtcataggggagtggtcctgtattagctgtcacgtgagtgcttttgcggcattttgcgacaccacgtggccatttgaggtatatatggccgagtgagcgagcaggatctccattttgaccgcgaaatttgaacgagcagcagccatgccgggcttctacgagatcgtgatcaaggtgccgagcgacctggacgagcacctgccgggcatttctgactcgtttgtgaactgggtggccgagaaggaatgggagctgcccccggattctgacatggatcggaatctgatcgagcaggcacccctgaccgtggccgagggagacg

SEQ ID NO: 94 - DNA, 876 bp, synthetic construct
  misc_feature 1..876: note = segment 5-14
  source 1..876: mol_type = other DNA
cgtctcgcgagaagctgcagcgcgacttcctggtccaatggcgccgcgtgagtaaggctccggaggccctcttctttgttcagttcgagaagggcgagagctactttcacctgcacgttctggtcgagaccacgggggtcaagtccatggtgctaggccgcttcctgagtcagattcgggaaaagcttggtccagaccatctacccgcggggtcgagccccaccttgcccaactggttcgcggtgaccaaagacgcggtaatggcgccggcgggggggaacaaggtggtggacgagtgctacatccccaactacctcctgcccaagactcagcccgagctgcagtgggcgtggactaacatggaggagtatataagcgcgtgcttgaacctggccgagcgcaaacggctcgtggcgcagcacctgacccacgtcagccagacgcaggagcagaacaaggagaatctgaaccccaattctgacgcgcccgtgatcaggtcaaaaacctccgcgcgctatatggagctggtcgggtggctggtggaccggggcatcacctccgagaagcagtggatccaggaggaccaggcctcgtacatctccttcaacgccgcctccaactcgcggtcccagatcaaggccgcgctggacaatgccggcaagatcatggcgctgaccaaatccgcgcccgactacctggtggggccctcgctgcccgcggacattacccagaaccgcatctaccgcatcctcgctctcaacggctacgaccctgcctacgccggctccgtctttctcggctgggctcagaaaaagttcgggaaacgcaacaccatctggctgtttggacccgccaccaccggcaagaccggagacg

SEQ ID NO: 95 - DNA, 902 bp, synthetic construct
  misc_feature 1..902: note = segment 5-15
  source 1..902: mol_type = other DNA
cacctgcgatcgaccaacattgcggaagccatcgcccacgccgtgcccttctacggctgcgtcaactggaccaatgagaactttcccttcaatgattgcgtcgacaagatggtgatctggtgggaggagggcaagatgacggccaaggtcgtggagtccgccaaggccattctcggcggcagcaaggtgcgcgtggaccaaaagtgcaagtcgtccgcccagatcgaccccacccccgtgatcgtcacctccaacaccaacatgtgcgccgtgattgacgggaacagcaccaccttcgagcaccagcagcctctccaggaccggatgtttaagttcgaactcacccgccgtctggagcacgactttggcaaggtgacaaagcaggaagtcaaagagttcttccgctgggccagtgatcacgtgaccgaggtggcgcatgagttttacgtcagaaagggcggagccagcaaaagacccgcccccgatgacgcggataaaagcgagcccaagcgggcctgcccctcagtcgcggatccatcgacgtcagacgcggaaggagctccggtggactttgccgacaggtaccaaaacaaatgttctcgtcacgcgggcatgcttcagatgctgtttccctgcaaaacgtgcgagagaatgaatcagaatttcaacatttgcttcacacacggggtcagagactgctcagagtgtttccccggcgtgtcagaatctcaaccggtcgtcagaaagaggacgtatcggaaactctgtgcgattcatcatctgctggggcgggctcccgagattgcttgctcggcctgcgatctggtcaacgtggacctggatgactgtgtttctgagcaataaatgacttaaaccaggtggcctctatgggatcgcaggtg

SEQ ID NO: 96 - DNA, 865 bp, synthetic construct; identical to SEQ ID NO: 22
  misc_feature 1..865: note = segment 5-16
  source 1..865: mol_type = other DNA

SEQ ID NO: 97 - DNA, 871 bp, synthetic construct; identical to SEQ ID NO: 23
  misc_feature 1..871: note = segment 5-17
  source 1..871: mol_type = other DNA

SEQ ID NO: 98 - DNA, 872 bp, synthetic construct; identical to SEQ ID NO: 24
  misc_feature 1..872: note = segment 5-18
  source 1..872: mol_type = other DNA

SEQ ID NO: 99 - DNA, 5767 bp, synthetic construct
  misc_feature 1..5767: note = pBR-delTypeIIS-3-XcmI
  source 1..5767: mol_type = other DNA
ttctcatgtttgacagcttatcatcgataagctttaatgcggtagtttatcacagttaaattgctaacgcagtcaggcaccgtgtatgaaatctaacaatgcgctcatcgtcatcctcggcaccgtcaccctggatgctgtaggcataggcttggttatgccggtactgccgggcctcttgcgggatatcgtccattccgacagcattgccagtcactatggcgtgctgctagcgctatatgcgttgatgcaatttctatgcgcacccgttctcggagcactgtccgaccgctttggccgccgcccagtcctgctcgcttcgctacttggagccactatcgactacgcgatcatggcgaccacacccgtcctgtggatcctctacgccggacgcatcgtggccggcatcaccggcgccacaggtgcggttgctggcgcctatatcgccgacatcaccgatggggaagatcgggctcgccacttcgggctcatgagcgcttgtttcggcgtgggtatggtggcaggccccgtggccgggggactgttgggcgccatctccttgcatgcaccattccttgcggcggcggtgctcaacggcctcaacctactactgggctgcttcctaatgcaggagtcgcataagggagagcgtcgaccgatgcccttgagagccttcaacccagtcagctccttccggtgggcgcggggcatgactatcgtcgccgcacttatgactgttttctttatcatgcaactcgtaggacaggtgccggcagcgctctgggtcattttcggcgaggaccgctttcgctggagcgcgacgatgatcggcctgtcgcttgcggtattcggaatcttgcacgccctcgctcaagccttcgtcactggtcccgccaccaaacgtttcggcgagaagcaggccattatcgccggcatggcggccgacgcgctgggctacgtcttgctggcgttcgcgacgcgaggctggatggccttccccattatgattcttctcgcttccggcggcatcgggatgcccgcgttgcaggccatgctgtccaggcaagtagatgacgaccatcagggacagcttcaaggatcgctcgcggctcttaccagcctaacttcgatcactggaccgctgatcgtcacggcgatttatgccgcctcggcgagcacatggaacgggttggcatggattgtaggcgccgccctataccttgtctgcctccccgcgttgcgtcgcggtgcatggagccgggccacctcgacctgaatggaagccggcggcacctcgctaacggattcaccactccaagaattggagccaatcaattcttgcggagaactgtgaatgcgcaaaccaacccttggcagaacatatccatagcgtccgccatctccagcagccgcacgcggcgcatctcgggcagcgttgggtcctggccacgggtgcgcatgatcgtgctcctgtcgttgaggacccggctaggctggcggggttgccttactggttagcagaatgaatcaccgatacgcgagcgaacgtgaagcgactgctgctgcaaaacgtctgcgacctgagcaacaacatgaatggttttcggtttccgtgtttcgtaaagtctggaaacgcggaagtcagcgccctgcaccattatgttccggatctgcatagcaggatgctgctggctaccctgtggaacacctacatctgtattaacgaagcgctggcattgaccctgagtgatttttctctggtcccgccgcatccataccgccagttgtttaccctcacaacgttccagtaaccgggcatgttcatcatcagtaacccgtatcgtgagcatcctctctcgtttcatcggtatcattacccccatgaacagaaatcccccttacacggaggcatcagtgacctaacaggaaaaaaccgcccttaacatggcccgctttatcagaagccagacattaacgcttctggagaaactcaacgagctggacgcggatgaacaggcagacatctgtgaatcgcttcacgaccacgctgatgagctttaccgcagctgcctcgcgcgtttcggtgatgacggtgaaaacctctgacacatgcagctcccggaaacggtcacagcttgtctgtaagcggatgccgggagcagacaagcccgtcagggcgcgtcagcgggtgttggcgggtgtcggggcgcagccatgacccagtcacgtagcgatagcggagtgtatactggcttaactatgcggcatcagagcagattgtactgagagtgcaccatatgcggtgtgaaataccgcacagatgcgtaaggagaaaataccgcatcaggcgcttttccgcttcctcgctcactgactcgctgcgctcggtcgttcggctgcggcgagcggtatcagctcactcaaaggcggtaatacggttatccacagaatcaggggataacgcaggaaagaacatgtgagcaaaaggccagcaaaaggccaggaaccgtaaaaaggccgcgttgctggcgtttttccataggctccgcccccctgacgagcatcacaaaaatcgacgctcaagtcagaggtggcgaaacccgacaggactataaagataccaggcgtttccccctggaagctccctcgtgcgctctcctgttccgaccctgccgcttaccggatacctgtccgcctttctcccttcgggaagcgtggcgctttctcatagctcacgctgtaggtatctcagttcggtgtaggtcgttcgctccaagctgggctgtgtgcacgaaccccccgttcagcccgaccgctgcgccttatccggtaactatcgtcttgagtccaacccggtaagacacgacttatcgccactggcagcagccactggtaacaggattagcagagcgaggtatgtaggcggtgctacagagttcttgaagtggtggcctaactacggctacactagaagaacagtatttggtatctgcgctctgctgaagccagttaccttcggaaaaagagttggtagctcttgatccggcaaacaaaccaccgctggtagcggtggtttttttgtttgcaagcagcagattacgcgcagaaaaaaaggatctcaagaagatcctttgatcttttctacggggtctgacgctcagtggaacgaaaactcacgttaagggattttggtcatgagattatcaaaaaggatcttcacctagatccttttaaattaaaaatgaagttttaaatcaatctaaagtatatatgagtaaacttggtctgacagttaccaatgcttaatcagtgaggcacctatctcagcgatctgtctatttcgttcatccatagttgcctgactccccgtcgtgtagataactacgatacgggagggcttaccatctggccccagtgctgcaatgataccgcgcgacccacgctcaccggctccagatttatcagcaataaaccagccagccggaagggccgagcgcagaagtggtcctgcaactttatccgcctccatccagtctattaattgttgccgggaagctagagtaagtagttcgccagttaatagtttgcgcaacgttgttgccattgctgcaggcatcgtggtgtcacgctcgtcgtttggtatggcttcattcagctccggttcccaacgatcaaggcgagttacatgatcccccatgttgtgcaaaaaagcggttagctccttcggtcctccgatcgttgtcagaagtaagttggccgcagtgttatcactcatggttatggcagcactgcataattctcttactgtcatgccatccgtaagatgcttttctgtgactggtgagtactcaaccaagtcattctgagaatagtgtatgcggcgaccgagttgctcttgcccggcgtcaacacgggataataccgcgccacatagcagaactttaaaagtgctcatcattggaaaacgttcttcggggcgaaaactctcaaggatcttaccgctgttgagatccagttcgatgtaacccactcgtgcacccaactgatcttcagcatcttttactttcaccagcgtttctgggtgagcaaaaacaggaaggcaaaatgccgcaaaaaagggaataagggcgacacggaaatgttgaatactcatactcttcctttttcaatattattgaagcatttatcagggttattgtctcatgagcggatacatatttgaatgtatttagaaaaataaacaaataggggttccgcgcacatttccccgaaaagtgccacctgacgtctaagaaaccattattatcatgacattaacctataaaaataggcgtatcacgaggccctttcatcttcaagaattcccaagattgcggtggcaagggtaatgaggtgctttatgactctgccgccgtcataaaatggtatgccgaaagggatgctgaaattgagaacgaaaagctgcgccgggaggttgaagaactgcggcaggccagcgaggcagatctccagccaggaactattgagtacgaacgccatcgacttacgcgtgcgcaggccgacgcacaggaactgaagaatgccagagactccgctgaagtggtggaaaccgcattctgtactttcgtgctgtcgcggatcgcaggtgaaattgccagtattctcgacgggctccccctgtcggtgcagcggcgttttccggaactggaaaaccgacatgttgatttcctgaaacgggatatcatcaaagccatgaacaaagcagccgcgctggatgaactgataccggggttgctgagtgaatatatcgaacagtcaggttaacaggctgcggcattttgtccgcgccgggcttcgctcactgttcaggccggagccacagaccgccgttgaatgggcggatgctaattactatctcccgaaagaatccgcataccaggaagggcgctgggaaacactgccctttcagcgggccatcatgaatgcgatgggcagcgactacatccgtgaggtgaatgtggtgaagtctgcccgtgtcggttattccaaaatgctgctgggtgtttatgcctactttatagagcataagcagcgcaacacccttatctggttgccgacggatggtgatgccgagaactttatgaaaacccacgttgagccgactattcgtgatattccgtcgctgctggcgctggccccgtggtatggcaaaaagcaccgggataacacgctcaccatgaagcgtttcactaatgggcgtggcttctggtgcctgggcggtaaagcggcaaaaaactaccgtgaaaagtcggtggatgtggcgggttatgatgaacttgctgcttttgatgatgatattgaacaggaaggctctccgacgttcctgggtgacaagcgtattgaaggctcggtctggccaaagtccatccgtggctccacgccaaaagtgagaggcacctgtcagattgagcgtgcagccagtgaatccccgcattttatgcgttttcatgttgcctgcccgcattgcggggaggagcagtatcttaaatttggcgacaaagagacgccgtttggcctcaaatggacgccggatgacccctccagcgtgttttatctctgcgagcataatgcctgcgtcatccgccagcaggagctggactttactgatgcccgttatatctgcgaaaagaccgggatctggacccgtgatggcattctctggttttcgtcatccggtgaagagattgagccacctgaatcgtgggaa

SEQ ID NO: 100 - DNA, 63 bp, synthetic construct
  misc_feature 1..63: note = Barcode-DraIII-F
  misc_feature 27..36: note = n is a, c, g, t or u
  source 1..63: mol_type = other DNA
tagcactgagtgtcgtcggcagcgtcnnnnnnnnnnccgagcccacgagaccacactgtggta

SEQ ID NO: 101 - DNA, 19 bp, synthetic construct
  misc_feature 1..19: note = Barcode-DraIII-R
  source 1..19: mol_type = other DNA
taccacagtgtggtctcgt

SEQ ID NO: 102 - DNA, 51 bp, synthetic construct
  misc_feature 1..51: note = segment
  source 1..51: mol_type = other DNA
aatgatacggcgaccaccgagatctacacaacctctctcgtcggcagcgtc

SEQ ID NO: 103 - DNA, 47 bp, synthetic construct
  misc_feature 1..47: note = segment
  source 1..47: mol_type = other DNA
caagcagaagacggcatacgagatttgcaggtgtctcgtgggctcgg

SEQ ID NO: 104 - DNA, 882 bp, synthetic construct
  misc_feature 1..882: note = segment 1-3B
  source 1..882: mol_type = other DNA
cacctgcgatccctgtagggcctgcggggtctattgggaaccaagctggagtgcagtggcacaatcttggctcactgcaatctccgcctcctgggttcaagcgattctcctgcctcagcctcccgagttgttgggattccaggcatgcatgaccaggctcagctaatttttgtttttttggtagagacggggtttcaccatattggccaggctggtctccaactcctaatctcaggtgatctacccaccttggcctcccaaattgctgggattacaggcgtgaaccactgctcccttccctgtccttccttgcttgagagtgtggcactctcccccctgtcgcgttcgctcgctcgctggctcgtttgggggggtggcagctcaaagagctgccagacgacggccctctggccgtcgcccccccaaacgagccagcgagcgagcgaacgcgacaggggggagagggcctgattggccatccgtagatgtacctggacatccaggtgatgccggcggcggtggtggaggcgcgcggaaagtcgcggacgcggttccagatgttgcgcagcggcaaaaagtgctccatggtcgggacgctctggccggtgaggcgtgcgcagtcgttgacgctctagaccgtgcaaaaggagagcctgtaagcgggcactcttccgtggtctggtggataaattcgcaagggtatcatggcggacgaccggggttcgaaccccggatccggccgtccgccgtgatccatgcggttaccgcccgcgtgtcgaacccaggtgtgcgacgtcagacaacgggggagcgctccttttggcttccttccaggcgcggcggctgctgcgctagcttttttggccactgggatcgcaggtg

SEQ ID NO: 105 - DNA, 865 bp, synthetic construct; identical to SEQ ID NO: 6
  misc_feature 1..865: note = segment 6-1
  source 1..865: mol_type = other DNA

SEQ ID NO: 106 - DNA, 870 bp, synthetic construct; identical to SEQ ID NO: 7
  misc_feature 1..870: note = segment 6-2
  source 1..870: mol_type = other DNA

SEQ ID NO: 107 - DNA, 929 bp, synthetic construct
  misc_feature 1..929: note = segment 6-3
  source 1..929: mol_type = other DNA
cacctgcgatccctgtagggcctgcggggtctattgggaaccaagctggagtgcagtggcacaatcttggctcactgcaatctccgcctcctgggttcaagcgattctcctgcctcagcctcccgagttgttgggattccaggcatgcatgaccaggctcagctaatttttgtttttttggtagagacggggtttcaccatattggccaggctggtctccaactcctaatctcaggtgatctacccaccttggcctcccaaattgctgggattacaggcgtgaaccactgctcccttccctgtccttccttgcttgagagtgtggcactctcccccctgtcgcgttcgctcgctcgctggctcgtttgggggggtggcagctcaaagagctgccagacgacggccctctggccgtcgcccccccaaacgagccagcgagcgagcgaacgcgacaggggggagagggcctgattggccgtagatgtaccttgacatccaggtgatgccggcggcggtggtggaggcgcgagggaactcgcggacgcggttccagatgttgcgcagcggcaggaagtagttcatggtgggcacggtctggcccgtgaggcgcgcgcagtcgttgatgctctagacatacgggcaaaaacgaaagcggtcagcggctcgactccgtggcctggaggctaagcgaacgggttgggctgcgcgtgtaccccggttcgaatctcgaatcaggctggagccgcagctaacgtggtactggcactcccgtctcgacccaggcctgcacaaaacctccaggatacggaggcgggtcgttttgcaaatttttggcggtcgaaaaaagctagtaagcgcggaaagcggccgaccgcaatggctcactgccgtagattggagaagaatcgccagggttgcgatcgcaggtg

SEQ ID NO: 108 - DNA, 914 bp, synthetic construct
  misc_feature 1..914: note = segment 6-4
  source 1..914: mol_type = other DNA
cgtctcgttgcgttgcggtgtgccccggttcgagaccgctcgggtcggccgaattccgcggctaacgagggcgtggctgccccgtcgtttccaagaccccataagccagccgacttctccagttacggagcgagcccctcttttgttttgttttttgccagatgcatcccgtactgcggcagatgcgcccccaccctccaccgcaacagcagccccctcctacgcaacagccggcgcttctgcctccgccccagcagcagcccaggtggaacctaccctgcgccgcaaccaggaggcactctaccgcttcctcaactcccactctgcatactttcgctctcaccgcgcgcgcattgagaaggccaccgccttcgaccgcatgaatcaagacatgtaacagtgtgttttaaaatatgtttaataaacagcactttttatgtgacacatgcatttgagataattttattcttaaaaatcgaaggggttctgccgggaggtttcggcatggcccgcgggcagggacacgttgcggaactggtacttggccagccacttgaactcggggatcagcagtttcggcagcagggtgtcggggaacgagtcggtccacagcttccgcgtcagttgcagggcgcccagcaggtcgggcgcggagatcttgaaatcgcagttgggacccgcgttttgcgcgcgagagttgcggtacacagggttgcagcactggaacaccatcagggccggatgcttcacgctcgccagcaccgtagcgtcggtgatcccgtccacgtcgaggtcttcggcgttggccatcccgaagggggtcatcttgcaggtctgccggcccatggtgggcacgcagccgggcttgtggttgcaatcgcagtgcagggggatcagcatcatctggggagacg

SEQ ID NO: 109 - DNA, 921 bp, synthetic construct
  misc_feature 1..921: note = segment 6-5
  source 1..921: mol_type = other DNA
ggtctcgctgggcctggtcggcgttcatccccgggtacatggccttcatgaaagcctccagctgcttaaacgcctgctgggccttggctccctcggtgaagaagaccccgcaggacttgctagaaaactggttggtagcgcacccggcgtcgtgcacgcagcagcgcgcgtcgttgttggccagctgcaccacgctgcgcccccagcggttctgggtaatcttggcccggtcggggttctcctttagcgcgcgttgcccgttctcgcttgccacatccatctcgatcatgtgctccttctggatcatggtggtcccgtgcaggcaccgcagcttgccctcgacttcggtacagccgtgcagccacagcgcgcaccccgtgctctcccagttcttgtgggcgatctgggaatgcgcatgcacgaacccctgcaggaagcggcccatcatggtcgtcagggtcttgttactggtaaaggtcagcggaatgccgcggtgctcctcgttgatgtacaggtggcagatgcggcgatacacctcgccctgctcgggcatcagttggaagttggattttaggtcgctttccacacggtagcgctccatcagcatattcatgatttccatgcccttctcccaggccgatacaatgggcaggctcagggggttcgtcaccgccatcttagcgctagcagccttcgtcagcgggtcgttctcattgagagtctcaaagctccgcttgccgtccttctcggtgatccgcacgggggggtagctgaagcccacggccgccagctcctcctcggcctctctttcgtcctcgctgtcctggctgacgtcctgcaggggcacatgcttcgttttgcggggtttctttttgggcggctgctgcggcggcggtggttgttcctgaggcgagggagacc

SEQ ID NO: 110 - DNA, 916 bp, synthetic construct
  misc_feature 1..916: note = segment 6-6
  source 1..916: mol_type = other DNA
ggtctcgcgagggggagcgcgagttctcgctcaccactactatctcttcttcttggtccgaggccacgcggcggtaggtatgtctcttcaggggcagaggcggaggcgacgggctctcgcggcccggcgggtggctggcagagccccttccgcgatcgggggtgcgctcccggcggcgctctaactgacttcctccgcggccggccattgtgttctcctagggaacaacaacaagcatggagactcagccatcgtcgccaacctcgccatctgcccccaccgccgacaagaagcagcagcagaatgagagcttaaccgccccgccgcccagccccgccacctttgtcgcggccccagacatgcaagagatggaggaatccattcagattgacctgggctatgtgacgcccgcggagcacgaggaggagcttgcagtgcgcttttcaacccaggaagagatacaccaagaacagccagagcaggaagcaaagagcgagcatgactacctccaccagagcgggggggaggacgccctcatcaagcatctggcccggcaggctatcatcgtcaaggacgcgctgcttgaccgcaccgaggtgcccctcagcgtggaggagctcagccgcgcctacgagctcaacctcttctcgccgcgcgtgccccccaagcgccagcccaacggcacctgcgagcccaacccacgcctcaacttctacccggtcttcgcggtgcccgaggccctggccacctaccacatctttttcaagaaccaaaggatccctgtctcctgtcgcgccaaccgcacccgcgccgactcccttttcaacctgggccccggtgcccgcctacctgatatcgcctccttggaagaggttcccaagatcttcgagggtctgggcagcgacgagaggagacc

SEQ ID NO: 111 - DNA, 900 bp, synthetic construct
  misc_feature 1..900: note = segment 6-7
  source 1..900: mol_type = other DNA
cacctgcgatcgagactcgggccgcaaacgctctgcaaggagaaggaggagatcatgagcaccacagcgccctggtggagttggaaggcgacaacgcgcgtctggcggtgctcaagcgcacgatcgagctgacccatttcgcctacccggcgcttaacctgccccccaaagtcatgagcacggttatggaccaggtgctcatcaagcgcgcgtcgcccatctccaaggagatgcaagaccccgagagctccgaggagggcaagcccgtggtcagcgacgagcagctggcgcggtggctgggaccccaagctagtccccagagcttggaagagcggcgcaagctcataatggccgtggtcctggtgaccgcggagctggagtgtctgcgccgcttcttcgccgacgcagaaactctgcgcaaggtcgaggagaacctgcactacatcttcaggcacgggttcgtacgccaggcctgcaagatctccaacgtggagctgaccaacctggtctcctacatgggcatcttgcacgagaaccgcctggggcagaacgtgctgcacaccaccctgcgcggggaggcccgccgcgactacatccgcgactgcgtttacctctacctctgccacacctggcagacagccatgggcgtgtggcagcagtgtctggaggagcagaacctaaaagagctctgcaagctcctgcagaagaacctcaaggccctgtggaccgggttcgacgagcgcaccaccgcctcggacctggcagacctcattttccccgagcgtctcaggctgacgctgcgcaacggtttgcccgactttatgagtcaaagcatgttgcaaaactttcgctctttcatcctcgaacgctccgggatcctgccggccacgatcgcaggtg

SEQ ID NO: 112 - DNA, 920 bp, synthetic construct
  misc_feature 1..920: note = segment 6-8
  source 1..920: mol_type = other DNA
cgtctcgccacctgctccgcgctgccctcggacttcgtgccgctgaccttccgcgagtgccccccgccgctgtggagccactgctacctgctgcgcttggccaactacctggcctaccactcggacgtgatcgaggacgtcagcagcgagggcctgctcgagtgccactgccgctgcaacctctgcacgccgcaccgctccctggcctgcaacccccagctgctgagcgagacccagatcatcggcaccttcgagttgcaagggcccggcgatgagggttctgccgccaaggggggtctgaaactcaccccggggctgtggacctcggcctacttgcgcaagttcgtgcccgaggactaccatcccttcgagatcaggttctacgaggaccaatcccagccgcccaaggccgagctgtcggcctgcgtcatcacccagggggcgatcctggcccaattgcaagctatccagaaatcccgccaagaattcttgctgaaaaagggccgcggggtctaccttgatccccagaccggtgaggagcttaaccccggcttcccccaggatgccccgaggaagcagcaagaagctgaaagtggagctgccgcccgtggaggatttggaggaagactgggagagcagtcaggcagaggaggaggagatggaagactgggacagcactcaggcagaggacagcctgcaagacagtctggaagacgaggaggaggcagaggaggtggaagaagtagccgccgccgccagaccgtcgtcctcggcggagaaagcaagcagcacggataccatctccgctccgggtcggggtcccgctcgaccccacagtagatgggacgagaccgggcgattcccgaaccccaccacccagaccggtaagaaggagcggcagggatacaagtccggagacg

SEQ ID NO: 113 - DNA, 821 bp, synthetic construct
  misc_feature 1..821: note = segment 6-9
  source 1..821: mol_type = other DNA
ggtctcggtcctggcgggggcacaaaaacgccatcgtctcctgcttgcaagcttgcgggggcaacatctcattcacccggcgctacctgctctttcaccgcggggtgaacttcccccgcaacatcttgcattactaccgtcacctccacagcccctactacttccaagaagaggcagaaaaagacaaaaccagcagctagaaaatccacagcggcggcggcaggtggactgaggatcgcggcgaacgagccggcgcagacccgggaactgaggaaccggatctttcccaccctctatgccatcttccagcagagtcgggggcaggagcaggaactgaaagtcaagaaccgttctctgcgctcgctcacccgcagttgtctgtatcacaagagcgaagaccaacttcagcgcacgcttgaggacgccgaggctctcttcaacaagtactgcgcactcactcttaaagagtagcccgcgcccgcccacacacggaaaaaggcgggaattacgtcacctgtgcacccccacccagcaccgctatgagcaaagaaattcccacgccttacatgtggagctaccagccccagatgggcctggccgccggcgccgcccaggactactccacccgcatgaattggctcagcgccgggcccgggatgatctcacgggtgaatgacatccgcgcccaccgaaaccagatactcctagaacagtcagcgctcaccgccacgccccgcaatcacctcaatccgcgtaattggcccgccgccctagtgtaccaggaaattccccagcccacgaccgtactacttccggagacc

SEQ ID NO: 114 - DNA, 771 bp, synthetic construct
  misc_feature 1..771: note = segment 6-10
  source 1..771: mol_type = other DNA
cacctgcgatcttccgcgagacgcccaggccgaagtccagctgactaactcaggtgtccagctggcgggcggcgccaccctgtgtcgtcaccaccccgctccaatgtcattttcatacacctggactaacggaagctatatcggagcaacatttggagctaactcatacaccttctcctacatagcccaacaataatcccaccctgcatgccaacccaccttttccctctatttataaatggaaactgaaacaaaaataaagttcaagtgttttattgattcaacagtttttcacaggattcgagtagttattttccctccaccctcccatctcatggaatacactatcctctccccacgcacagccttaaacatctgaatgctattggtaatggacatggttttgatctccacattccacacagtttcagagcgagacagtctcgggtcggtcaaggagatgaaaccctccgggcactcctgcatctgcacctcacagttcaacagctgagggctgtcctcggtgattggaatcacagttatctggaataagagcgatgagaatcataatccgcaaacgggatcgggcggttgtggcgcatcaggccccgcagcagtcgctgtctgcgccgctccgtcaagctgctactcaaggggtccgggtccagggactccctgcgcatgatgccaatggccctgagcatcagtcgcctggtacggcgggcgcagcagcggatgcggatctcactcaggtcggagcgatcgcaggtg

SEQ ID NO: 115 - DNA, 758 bp, synthetic construct
  misc_feature 1..758: note = segment 6-11
  source 1..758: mol_type = other DNA
cgtctcggagcagtacgtgcagcacagcaccaccaagttgttcaacagtccatagttcaacgtgctccagccaaaactcatttgtggaactatgctgcccacatgtccatcgtaccagatcctgatgtaaatcaggtggcgtcccctccagaacacactgcccatgtacatgatctccttgggcatgtgcaggttcaccacctcccggtaccacatcacccgctggttgaacatgcagccctggataattctgcggaaccagatggcaagtaccgtcccgcccgccatgcagcgcagggaccccgggttctggcaatggcagtggatcacccaccgctcgcgaccgtggatcaactgggaactaaacaagtctatgttggcacagcacaggcacacgctcatgcatgtcttcagcactctcaattcctcgggggtcaggaccatatcccagggcacagggaactcttgcaggacagtgaacccggccgaacagggcaatcctcgcacggaacttacattgtgcatggacagggtatcgcaatcaggcagcaccggatgatcctccaccagagaagcgcggctctcggtctcctcacagcgaggtaaggtggccggcggttggtacggatgatggcgagataacgctaatcgtgttctggatcgtgtcatgatggagctgtttccggacattttcgtatttcacaaagcagaacctggtccgggcactgcacaccgctcgtcggcgacggtcggagacg

SEQ ID NO: 116 - DNA, 761 bp, synthetic construct
  misc_feature 1..761: note = segment 6-12
  source 1..761: mol_type = other DNA
cacctgcgatcggtctcggcgcttcgagcgctcaatgttgaagttatagaacagccactccctcagaacgtgcagtatctcctgagcctcttgggtgatgaaaatcccatccgccctgatggctctgattacatcaaccacggtggaatgggccaaacccagccagatgatgcaattttgttgggtttcggtgacggcgggggagggaagaacaggaagaaccatgattaactttattccaaacggtctcggaacacttcaaaatgcaggtcccggaggtggcacctctcgcccccactgtgttggtggaaaataacagccaggtcaaaggtaacacggttctcgagatgttccacggtggcttccagcaaagcctccacgcgcacatccagaaacaagaggacagcgaaagcgggagcgttttctaattcctcaatcatcatattacactcctgcaccatgcctagataattttcatttttccagccttgaatgattcgtattagttcctgaggtaaatccaagccagccatgataaaaagctcgcgcagagcgccctccaccggcattcttaagcacaccctcataattccaacagattctgctcctggttcacctgtagtagattaacaagtggaatatcaattgctctgccgcaatccctaagctcctcccttagcagtaactgtatgtactcattcatatcttctccgaaatttttagccataggaccaccaggaacaagagaaggatcgcaggtg

SEQ ID NO: 117 - DNA, 758 bp, synthetic construct
  misc_feature 1..758: note = segment 6-13
  source 1..758: mol_type = other DNA
cgtctcggaagggcaagccacattacagataaagcgaagtcctccccagtgagcattgccaaatgtaagattgaaataagcatgctggctagacccggtgatatcttccagataactggacagaaaatcaggcaagcaatttttaagaaaattaacaaaagaaaagtcgtctaggtgcacgtttagagcctcaggaacaacgatggaataagtgcaaggagtacgttccagcatggttagtgtttttggtgatctgtagaacaaaaaataaacatgcaatattaaaccatgctagcctggcgaacaggtggataaatcactctttccaacaccaggcaggctacagggtctccggcgcgaccattgtagaagctgacattatgattaaaaagcatcaccgacagaccttcccggtggccggcatggatgattcgagaagaagcatacactccgggaacattggcgtccgtgagtgaaaaaaagcgacctataaagccttgaggcactacaatgcttaatcttaattccagcaaagcgaccccatgcggatgaagcacaaaattggcaggtgcgtaaaaaatgtaattactccccttctgcacaggcagcaaagcccccgctccctccagaaacacatacaaaacctgagcgtccatagcttaccgagcacggcaggcgcaagagtcagagaaaaagctgagctctaacctaactgcccgcttctgtactcaatatatagccctaacctcacggagacg

SEQ ID NO: 118 - DNA, 767 bp, synthetic construct
  misc_feature 1..767: note = segment 6-14
  source 1..767: mol_type = other DNA
cacctgcgatctcactgacgtaaaggccaaggtctaaaaatacccgccaacacgcccagaaaccggtgacacactaaaaaaatacgtgcacttcctcaaacgcccaaactggcgtcatttccggtttcccacgctacgtcacctctcaacgactttcaaattccgtcgaccgttaaacacatcagttaggcctatgtggccgggttttgtaagcagtgatgtcataatgatgtaatgcttattgtcacgcgatagttaatgattaacagtcatgtgatgtgttttatccaataggaagaaagcgcgcgtatgagttctcgcgagacttccggggtataaaagaccgagtgaacgagcccgccgccattctttgctctggactgctagaggaccctcgctgccatggctaccttctatgaagtcattgttcgcgtcccatttgacgtggaggaacatctgcctggaatttctgacagctttgtggactgggtaactggtcaaatttgggagctgcctccagagtcagatttaaatttgactctggttgaacagcctcagttgacggtggctgatagaattcgccgcgtgttcctgtacgagtggaacaaattttccaagcaggagtccaaattctttgtgcagtttgaaaagggatctgaatattttcatctgcacacgcttgtggagacctccggcatctcttccatggtcctcggccgctacgtgagtcagattcgcgcccagctggtgaaagtggatcgcaggtg

SEQ ID NO: 119 - DNA, 756 bp, synthetic construct
  misc_feature 1..756: note = segment 6-15
  source 1..756: mol_type = other DNA
ggtctcgagtggtcttccagggaattgaaccccagatcaacgactgggtcgccatcaccaaggtaaagaagggcggagccaataaggtggtggattctgggtatattcccgcctacctgctgccgaaggtccaaccggagcttcagtgggcgtggacaaacctggacgagtataaattggccgccctgaatctggaggagcgcaaacggctcgtcgcgcagtttctggcagaatcctcgcagcgctcgcaggaggcggcttcgcagcgtgagttctcggctgacccggtcatcaaaagcaagacttcccagaaatacatggcgctcgtcaactggctcgtggagcacggcatcacttccgagaagcagtggatccaggaaaatcaggagagctacctctccttcaactccaccggcaactctcggagccagatcaaggccgcgctcgacaacgcgaccaaaattatgagtctgacaaaaagcgcggtggactacctcgtggggagctccgttcccgaggacatttcaaaaaacagaatctggcaaatttttgagatgaatggctacgacccggcctacgcgggatccatcctctacggctggtgtcagcgctccttcaacaagaggaacaccgtctggctctacggacccgccacgaccggcaagaccaacatcgcggaggccatcgcccacactgtgcccttttacggctgcgtgaactggaccaatgaaaactttccctttaatgacggagacc

SEQ ID NO: 120 - DNA, 785 bp, synthetic construct
  misc_feature 1..785: note = segment 6-16
  source 1..785: mol_type = other DNA
ggtctcgtgactgtgtggacaaaatgctcatttggtgggaggagggaaagatgaccaacaaggtggttgaatccgccaaggccatcctggggggctcaaaggtgcgggtcgatcagaaatgtaaatcctctgttcaaattgattctacccctgtcattgtaacttccaatacaaacatgtgtgtggtggtggatgggaattccacgacctttgaacaccagcagccgctggaggaccgcatgttcaaatttgaactgactaagcggctcccgccagattttggcaagattactaagcaggaagtcaaggacttttttgcttgggcaaaggtcaatcaggtgccggtgactcacgagtttaaagttcccagggaattggcgggaactaaaggggcggagaaatctctaaaacgcccactgggtgacgtcaccaatactagctataaaagtctggagaagcgggccaggctctcatttgttcccgagacgcctcgcagttcagacgtgactgttgatcccgctcctctgcgaccgctcaattggaattcaaggtatgattgcaaatgtgactatcatgctcaatttgacaacatttctaacaaatgtgatgaatgtgaatatttgaatcggggcaaaaatggatgtatctgtcacaatgtaactcactgtcaaatttgtcatgggattcccccctgggaaaaggaaaacttgtcagattttggggattttgacgatgccaataaagaacagtaaataaagcgagtagtcggcctctatggggagacc

SEQ ID NO: 121 - DNA, 865 bp, synthetic construct; identical to SEQ ID NO: 22
  misc_feature 1..865: note = segment 6-17
  source 1..865: mol_type = other DNA

SEQ ID NO: 122 - DNA, 871 bp, synthetic construct; identical to SEQ ID NO: 23
  misc_feature 1..871: note = segment 6-18
  source 1..871: mol_type = other DNA

SEQ ID NO: 123 - DNA, 872 bp, synthetic construct; identical to SEQ ID NO: 24
  misc_feature 1..872: note = segment 6-19
  source 1..872: mol_type = other DNA

SEQ ID NO: 124 - DNA, 865 bp, synthetic construct
  misc_feature 1..865: note = segment 7-1
  source 1..865: mol_type = other DNA
cacctgcgatcattagcggccgcttggccactccctctctgcgcgctcgctcgctcactgaggccgggcgaccaaaggtcgcccgacgcccgggctttgcccgggcggcctcagtgagcgagcgagcgcgcagagagggagtggccaactccatcactaggggtggccttgatggccaattcgattcgattagggcctacttggcctaatagtaatcaattacggggtcattagttcatagcccatatatggagttccgcgttacataacttacggtaaatggcccgcctggctgaccgcccaacgacccccgcccattgacgtcaataatgacgtatgttcccatagtaacgccaatagggactttccattgacgtcaatgggtggagtatttacggtaaactgcccacttggcagtacatcaagtgtatcatatgccaagtacgccccctattgacgtcaatgacggtaaatggcccgcctggcattatgcccagtacatgaccttatgggactttcctacttggcagtacatctacgtattagtcatcgctattaccatggtgatgcggttttggcagtacatcaatgggcgtggatagcggtttgactcacggggatttccaagtctccaccccattgacgtcaatgggagtttgttttggcaccaaaatcaacgggactttccaaaatgtcgtaacaactccgccccattgacgcaaatgggcggtaggcgtgtacggtgggaggtctatataagcagagctggtttagtgaaccgtcagatgccaccatggtgagcaagggcgaggagctgttcaccggggtggtgcccatcctggtcgagctggacggatcgcaggtg

SEQ ID NO: 125 - DNA, 870 bp, synthetic construct; identical to SEQ ID NO: 7
  misc_feature 1..870: note = segment 7-2
  source 1..870: mol_type = other DNA

SEQ ID NO: 126 - DNA, 838 bp, synthetic construct
  misc_feature 1..838: note = segment 7-3
  source 1..838: mol_type = other DNA
cacctgcgatccctgtagggcctgcggggtctattgggaaccaagctggagtgcagtggcacaatcttggctcactgcaatctccgcctcctgggttcaagcgattctcctgcctcagcctcccgagttgttgggattccaggcatgcatgaccaggctcagctaatttttgtttttttggtagagacggggtttcaccatattggccaggctggtctccaactcctaatctcaggtgatctacccaccttggcctcccaaattgctgggattacaggcgtgaaccactgctcccttccctgtccttacccctagtgatggagttgcccactccctctatgcgcgctcgctcgctcggtggggccggcagagcagagctctgccgtctgcggacctttggtccgcaggccccaccgagcgagcgagcgcgcatagagggagtgggcaaggcctgattggccgtaaacatatcgagagagccaggtgatgccggcggcggtagtggcggcgcgggcgtattcgcgaacgcggttccagatgttacgcaacggggagaagcgttccatggcgggcacgctttgaccagtcagacgggcgcaatcttgtacgctctagatgaaaaaacagagagcggtcacggactttcctccgtagcctggaggacagaccgccagggtgcagtggcaaacaacccccggttcgagaccggctggatctgccactcccgacgcgccggccgtgcgtccacgacggaaaccccgccgagacctagccgcggtccctggatctccagatacggaggggagtctttttgttgttttttgtaggatcgcaggtg

SEQ ID NO: 127 - DNA, 833 bp, synthetic construct
  misc_feature 1..833: note = segment 7-4
  source 1..833: mol_type = other DNA
ggtctcggtagatgcatccggtgttgcgacagatgcgtccgacggcgcctccaacacagccgccgctcccgccccccactagcgcccctgcagccgttgctctctccggagcaccatggaccttcttaccggcgttccaaacagcatgcttcaaagcccccaggttgtacccaccctgcgtcacaaccaggagcggttgtaccgtttcctggcgcaacgttctccctactttcagcgtcattgcgagcgtatcaaaaaagccaccgcgtttgaccaaatgaaaaacaacatgtaacggttcaataaaagcttttattgattcaaaaaattcatgcatgcagactttttattttaaaatggttctttctccccatcgccgtggctggcgggcaaagctacgttgcgatactgcaaacgagaggaccacttaaattctggaatcagcatcttaggaagggggccatcgacgttctctccccacagccgtcgtacaagttgcaaagctcccaaaaggtcaggtgcagaaattttgaaatcacagttgggaccttggccaccacgggagttgcggtatacggggttagcgcactggtaaaccagcacacagggatactggatactggcaagagccaccttgtcggttacttcttcagctctaagactgtcaacattgcttagagcgaaaggggtggctttacacatttgccgacccaattggggcacaccggtgggcttgtacaggcagtcgcagcgcatcaccattaataggcgttttagcccgttttgcatttttggatattcggcttgcataaaagcttctatctgcggagacc

SEQ ID NO: 128 - DNA, 848 bp, synthetic construct
  misc_feature 1..848: note = segment 7-5
  source 1..848: mol_type = other DNA
cacctgcgatcctgcaaaaaagccgtctgagcctttgttccttccgagaaaaacagaccgcaggacttggcagaaaacacattggtggcacagctcacgtcttctacacaacaacgggcatcgtcattcttcagttgaaccacgctgcgcccccaccggttttgtaccaccttggctcgactcgggtgctcctttaacgcccgctgagcgttctcgctcgctacatccatttccaccaactgctctttttgaatcatttccaggccatgataacagcgtagcactccctcttgctcggtgcagccgtgaagccaaatcgcgcaaccagtgggctcccattcattgttttttaccccggcgtacgactccacgtaggctctcaaaaaacgtcccatcatttccacaaatgtcttgtggctggtgaaggtgagagggaggccgcgatgctcctcgttaagccacgtttggcaaattttgcgataaacgttgctttgttcgggtaggaacttgaagccattcttctcttcggcctccacatgatacttttccattagctttatcattaaatccatgcctttctcccaggcggaaaccaagggctctgcctgcggattaagaaccactgatgtaacagctttggaagtgctaggctcttcttcctcgttgttttcctctgacgggggaggcacacctttgggctccaagcgtcttacatatcgcttgccactggccttttgaacgacctgcacgccggggtgactgaacccggtgtacaccacctcttcttcttcctcctcgctgtctggaaccacttcgggagacggaggcaaaactggagatcgcaggtg

SEQ ID NO: 129 - DNA, 835 bp, synthetic construct
  misc_feature 1..835: note = segment 7-6
  source 1..835: mol_type = other DNA
ggtctcgtggaacgcgatccggcacttgaacattcttgcgcaacttctttttgggaggaagtgacggggcccgttctggactcgtctcctgcaagtagggagtgatggtggggagttcttgctgacggccggccatgctttactcctaggcgagaaaatatggaggaggatcttaagctgcagccagactccgaaaccttaaccacccccaactctgaggtcggcgccgtcgagctagtgaaacatgaggaggaaaatgagcaagtggagcaagatccgggctatgtaacgccccccgaggacggcaaggaaccagtggccgcactcagcgaacccaactatttgggaggggaggacgacgtgctcctgaagcacatagcgcgacagagcaccattgtacgagaagccctcaaggaatgcacacagactccgctgacggtggaggaattaagccgcgcgtatgaagctaacctgttttcgccgcgtgtaccgccaaaaaagcagcctaacggcacctgcgaaacaaacccgcgcctcaatttttatcccgtctttgcggtgcctgaagcactggctacttatcacatctttttcaagaaccaacgcattcccctctcttgccgcgccaaccgtacacgcggtgacggccttttgcatctcaaagctggagctcacatacctgagatcgtttctttagaagaagtacccaagatttttgaaggtcttggcaaggacgaaaaacgggcggcaaatgctctgcaaaaaaacgaaaccgagaatcagaacgtgttggtagagctggagggtgacaacgcgcgtttggccgtaggagacc

SEQ ID NO: 130 - DNA, 833 bp, synthetic construct
  misc_feature 1..833: note = segment 7-7
  source 1..833: mol_type = other DNA
cacctgcgatccgtactcaaacgcaccattgaagtttcacactttgcttatcccgcgctaaatcttcctcccaaagtaatgcgttctgttatggatcaagtgcttattaagcgagcagagcccattgatccccaacaacccgacctaaactctgaggacggacaacccgtagtctcagacgacgagcttgctcgctggctaggtacccaggatccctcagagctgcaagagcggcgaaaaatgatgatggcagcagttttggttacagtggaattggaatgcctgcagcgcttctttgctaaccctcaaacactgcgcaaagtcgaggagtccctgcactatgccttccgtcatggctacgttcgtcaggcctgcaagatctccaacgtagagctcagcaatctgatctcttacatgggcattctacacgaaaaccggctggggcagaacgttcttcactgcaccttgcaaggggaggcccgccgagactacgtccgcgactgcatctatcttttccttattctcacctggcaaaccgctatgggagtctggcagcagtgcttggaagagcaaaacctccaggagcttaataaattgctagtacgagcccgtcgcgaactctggacgtcttttgacgagcgtacggttgcccgccagctggcaaacctcatttttcccgagcggcttatgcaaacattgcaaaatggtttgccagactttgtcagccaaagtatcttgcaaaactttcgctcctttgtactcgagcgttccggcatcttgccggctatgagttgtgctttgccctccgattttgtccccctcgatcgcaggtg

SEQ ID NO: 131 - DNA, 839 bp, synthetic construct
  misc_feature 1..839: note = segment 7-8
  source 1..839: mol_type = other DNA
ggtctcgcctctgctaccgcgaatgccccccaccgttgtggagtcactgctacctcctccgtctagccaactatttggcccaccactctgatcttatggaagactctagcggcgacggactgctagaatgtcactgccgttgcaacctctgcacccctcatcgctcactggtctgtaacaccgagcttcttagcgaaacccaagtaatcggtacctttgagattcaagggccagagcaacaagaaggtgcttccagcctcaaactcacgccggcgttgtggacttccgcctacctacgcaaatttattcccgaagactatcacgcccaccaaattaaattttatgaagaccaatcacgacctcccaaagtcccccttacagcctgtgttatcacccaaagccaaattctggcccaattacaagctattcagcaggcgcgtcaggaatttcttttaaaaaaaggacacggggtctatttggacccccaaaccggtgaagaacttaataccccgtcactctccgccgccgcttcgtgccgttcgcagaaacatgccacccaagggaaacaagcatcccatcgcgcaacggcaatcccagcagaaactacaaaagcagtgggacgaggaggagacgtgggacgacagccaggcagaggaagtttcagacgaggaggcggaggagcagatggagagctgggacagcctagacgaggaggacctagaggacgtggaggaagaaaccatcgccagcgacaaggcaccatctttcaaaaaacccgttcggagccaacctccgaaaactatcccgcccctgccaccgcaaccatgttcacggagacc

SEQ ID NO: 132 - DNA, 834 bp, synthetic construct
  misc_feature 1..834: note = segment 7-9
  source 1..834: mol_type = other DNA
cacctgcgatctcactgaaagccagccgtaggtgggacaccgtctccatcgccggatcgccaacagccccagctggtaagcagcctaagcgcgcacgacggggatactgctcctggcgagcccataaaagcaatattgtcgcatgcctccagcactgccggggcaatatctcattcgcacggcgttacttgctttttcacgacggggtggcggttcctcgcaacgtcctctactattaccgtcatctctacagcccctacgaaacgtttggagaaaacacctcgagtgcgtaagacctcatccgccattgccacccgccaggattcgcccgccacgcaggagctcagaaaacgcatctttccgacgctgtatgctattttccagcagagccgcggtcaacagctggaactcaaagtaaaaaaccgatcactccgttcgctcacccgcagctgcttgtatcacagaagtgaagaccaactgcagcgcacgctggaggacgccgaggcactgttcaataaatattgctcggtgtctcttaaggactaaacacccgcgctttttttaggcgccaaattacgtcattgacattatgagcaaagacattcccacgccttacatgtggagctatcagccgcaaatgggcctggcagctggagcttctcaggattactccagtcgcatgaattggcttagtgccggcccccacatgattgggcgggtaaatggaattcgtgccactcgaaaccaaattctgctagaacaggccgccctaacctctaccccgcgacgtcagctgaacccaccctcttggcctgccgcccaggatcgcaggtg

SEQ ID NO: 133 - DNA, 844 bp, synthetic construct
  misc_feature 1..844: note = segment 7-10
  source 1..844: mol_type = other DNA
ggtctcgccaggtttatcaggaaaaccccgccccgaccacagtccttctgccacgcgacgcggaagccgaagtccaaatgactaactccggagcgcaattagcgggcggcgccagacacgtcaggttcagagatcgaccctcgccctattcctccgaggtgaccctaacatggccatatcttttcagagcatttataatcatgcaatagaaggctactcattaaaattcacctggcgcgttcgaaataatgaacgttttgacatcccctgttgctcattttcttatgtaacagaacaataaaatattgttattttgtattttcaactttattgatacttttacagaattctaaccgttaatctccctccccccttccactttaccttatacacctccctttccccctgtaccaccgcaaacaactgcaatttaggatttacacaacgattcttctgtgacaaaatcaacacaggttctttgctggcaaagcgctgatccgtaatggaaatgaaaccttcagaaacatcgtccaacagcacggtggagtccaaagcagagctctgcaaaaacaaatacagtcaagctctccacgggttctcgcctctgttgtagtctgccaacgtaaacgggcagtaccgctccatcaagccccgcagtaatccctgtctccggggttccaccaagctcctcatgagtgacctaacggtgaagcttcccaacactttcaccgccttggccagcagccgccgcgtccgacgagcgcagcaccgcacagaaagctcatccaagtttttacaataggtacagcccaacaccaccatattattcataattccggagacc

SEQ ID NO: 134 - DNA, 829 bp, synthetic construct
  misc_feature 1..829: note = segment 7-11
  source 1..829: mol_type = other DNA
cacctgcgatcttccataactaaaaaaactccacccaaacgacatgcgctccaacactatagccgcgtgcccatcatacagcaggcgaatatatataaaatgcctacctctgacaaacacgctccccataaataacacttccttgggcatgccacaatttacaatttctcgataccaagggaatcttaagttatacagtgaaccataaatcatcattttaaaccaatttgctaacactacaccccccgccttacattgaagagacccaggtttaatacagtgacagtgtatagtccagcgttcaaaacctcttacaatttgattaaaatcaacattaatagtggcacagcaaacacaaacacgcatgtaaattttgcacacatgcttttcccatttagacaatatcatgtcccaccacattggccactcctgcaatactacaaaaggcgcacaagatggaatagacctcacctcgctcacataatgcatattcaaatgttcacactctaaaagtccaggagtcctttccattgtggcaataggcacagaatcctcagagggaggtggaagacggtgggtttggtacgaactcagtctgcagcgaaaccatctgtcgcgttgcatcataaattaaaagctcgcgcacagcttcgtacttctgttttaagaaacgaacacgctgccaacaaatgttcgcaaatcgacggtttcgttgtcgcgctctttcagttttcagggcaacgttcagccactcctgcagtccacttaacagctcctcagcccgtggagatatgctgacattataccttattatgtccgatcgcaggtg

SEQ ID NO: 135 - DNA, 835 bp, synthetic construct
  misc_feature 1..835: note = segment 7-12
  source 1..835: mol_type = other DNA
ggtctcggtccccataaacgttcaaacagcaggttaaagccaactccaaccaagaaatacaaaggccttgatcccgactcactggaggtggagggagagacggaagaggcataattattccagacggttgtaaagcgagccaaagtgcaagtcacgaagatcacacctctccccaccgctgcgttggtgaaaaattacagccaagtcaaaaaagatgcgattttccaaattaccaatcacggcttccactaaggctggcacacgcacttcaagaaacacaaacatagcaaaagcattttcctcaaaatcttcaaacattaagctgcaatcttgaataattcccaaataattttccgcttgccacccgcgcaacacatccattaaaatttcttgtaaactggcgccatgtaattcaaaaagtttgttaagagcaccctctactgtcatacgcaggcacaccttcatggttgaaaaagatcaggttcccgtgtcacctgcagttcatttaaaagattaacattaggctcaaaaccccgatcccgaatctccatgcgtagcattagttgtacaaagtcatccaaatcattgcatataagctctgtcagttcgctatcaggaagcagctcaggtgatgctacacaacaaatcatctctagcgtaggagctaaagacgttaaggtaaagccacaataagcagcttgaagaactggagtaacacaatgcaaaatgtgcagcaaaaactccgacatgtttgtctttaaaaaatctaccacagaaatgtccatattatttaaataaaacatcaggggctcaggaaccaccaccgaaggagacc

SEQ ID NO: 136 - DNA, 840 bp, synthetic construct
  misc_feature 1..840: note = segment 7-13
  source 1..840: mol_type = other DNA
ggtctcgcgaaataaaaaccggtcgtaacaaatacattgtgtcctgcaacaaaaaaaaaatattaatgcccacacctgggaaaacctgttctaaaaccaaacaggtataagtattacaaatgcctccctttgccccccaatccaaaccaaataagctgccccgtcttaccgcgacaaagcacacagaacaaaacacactccgcagacgaacacaatatttatacactccctttgccgtcaaaagtccacaaaaactccaaaggtcagaaaaaccgccacatgaacacttccgcatactgtttcacatatggcctatgtggcccagagagggagtggccaactccatcactaggggtagcgcgaagcgcctcccacgctgccgcgtcagcgctgacgtaaattacgtcataggggagtggtcctgtattagctgtcacgtgagtgcttttgcggcattttgcgacaccacgtggccatttgaggtatatatggccgagtgagcgagcaggatctccattttgaccgcgaaatttgaacgagcagcagccatgccgggcttctacgagatcgtgatcaaggtgccgagcgacctggacgagcacctgccgggcatttctgactcgtttgtgaactgggtggccgagaaggaatgggagctgcccccggattctgacatggatcggaatctgatcgagcaggcacccctgaccgtggccgagaagctgcagcgcgacttcctggtccactggcgccgcgtgagtaaggctccggaggccctcttctttgttcagttcgagaagggcgagtcctactttcacctgcacgttctggtcggagacc

SEQ ID NO: 137 - DNA, 795 bp, synthetic construct
  misc_feature 1..795: note = segment 7-14
  source 1..795: mol_type = other DNA
cacctgcgatcggtcgagaccacgggggtcaagtccatggtcctgggccgcttcctgagtcagatcagagacaggctggtgcagaccatctaccgcggggtagagcccacgctgcccaactggttcgcggtgaccaagacgcgaaatggcgccggcggggggaacaaggtggtggacgagtgctacatccccaactacctcctgcccaagacgcagcccgagctgcagtgggcgtggactaacatggaggagtatataagcgcgtgtctgaacctcgcggagcgtaaacggctcgtggcgcagcacctgacccacgtcagccagacgcaggagcagaacaaggagaatctgaacccgaattctgacgcgcccgtgatcaggtcaaaaacctccgcgcgctacatggagctggtcgggtggctggtggaccggggcatcacctccgagaagcagtggatccaggaggaccaggcctcgtacatctccttcaacgccgcctccaactcgcggtcccagatcaaggccgcgctggacaatgccggaaagatcatggcgctgaccaaatccgcgcccgactacctggtaggcccgtccttacccgcggacattaaggccaaccgcatctaccgcatcctggagctcaacggctacgaccccgcctacgccggctccgtcttcctgggctgggcgcagaaaaagttcggtaaaaggaatacaatttggctgttcgggcccgccaccaccggcaagaccaacatcgcggaagccatcgcccacgccgtgcgatcgcaggtg

SEQ ID NO: 138 - DNA, 868 bp, synthetic construct
  misc_feature 1..868: note = segment 7-15
  source 1..868: mol_type = other DNA
cacctgcgatcgtgcccttctacggctgcgtcaactggaccaatgagaactttcccttcaacgattgcgtcgacaagatggtgatctggtgggaggagggcaagatgaccgccaaggtcgtggagtccgccaaggccattctgggcggaagcaaggtgcgcgtcgaccaaaagtgcaagtcctcggcccagatcgaccccacgcccgtgatcgtcacctccaacaccaacatgtgcgccgtgatcgacgggaacagcaccaccttcgagcaccagcagcccctgcaggaccgcatgttcaagttcgagctcacccgccgtctggagcacgactttggcaaggtgaccaagcaggaagtcaaagagttcttccgctgggctcaggatcacgtgactgaggtgacgcatgagttctacgtcagaaagggcggagccaccaaaagacccgcccccagtgacgcggatataagcgagcccaagcgggcctgcccctcagttgcggagccatcgacgtcagacgcggaagcaccggtggactttgcggacaggtaccaaaacaaatgttctcgtcacgcgggcatgcttcagatgctgtttccctgcaagacatgcgagagaatgaatcagaatttcaacgtctgcttcacgcacggggtcagagactgctcagagtgcttccccggcgcgtcagaatctcaacctgtcgtcagaaaaaagacgtatcagaaactgtgcgcgattcatcatctgctggggcgggcacccgagattgcgtgttcggcctgcgatctcgtcaacgtggacttggatgactgtgtttctgagcaataaatgacttaaaccaggtggcctctatgggatcgcaggtg

SEQ ID NO: 139 - DNA, 865 bp, synthetic construct; identical to SEQ ID NO: 22
  misc_feature 1..865: note = segment 7-16
  source 1..865: mol_type = other DNA

SEQ ID NO: 140 - DNA, 871 bp, synthetic construct; identical to SEQ ID NO: 23
  misc_feature 1..871: note = segment 7-17
  source 1..871: mol_type = other DNA

SEQ ID NO: 141 - DNA, 872 bp, synthetic construct; identical to SEQ ID NO: 24
  misc_feature 1..872: note = segment 7-18
  source 1..872: mol_type = other DNA

SEQ ID NO: 142 - DNA, 871 bp, synthetic construct
  misc_feature 1..871: note = segment 8-1
  source 1..871: mol_type = other DNA
cacctgcgatcattagcggccgcttggccactccctctatgcgcgctcgctcgctcggtggggcctgcggaccaaaggtccgcagacggcagagctctgctctgccggccccaccgagcgagcgagcgcgcatagagggagtggccaactccatcactaggggtaccgcgggccttgatggccaattcgattcgattagggcctacttggcctaatagtaatcaattacggggtcattagttcatagcccatatatggagttccgcgttacataacttacggtaaatggcccgcctggctgaccgcccaacgacccccgcccattgacgtcaataatgacgtatgttcccatagtaacgccaatagggactttccattgacgtcaatgggtggagtatttacggtaaactgcccacttggcagtacatcaagtgtatcatatgccaagtacgccccctattgacgtcaatgacggtaaatggcccgcctggcattatgcccagtacatgaccttatgggactttcctacttggcagtacatctacgtattagtcatcgctattaccatggtgatgcggttttggcagtacatcaatgggcgtggatagcggtttgactcacggggatttccaagtctccaccccattgacgtcaatgggagtttgttttggcaccaaaatcaacgggactttccaaaatgtcgtaacaactccgccccattgacgcaaatgggcggtaggcgtgtacggtgggaggtctatataagcagagctggtttagtgaaccgtcagatgccaccatggtgagcaagggcgaggagctgttcaccggggtggtgcccatcctggtcgagctggacggatcgcaggtg

SEQ ID NO: 143 - DNA, 870 bp, synthetic construct; identical to SEQ ID NO: 7
  misc_feature 1..870: note = segment 8-2
  source 1..870: mol_type = other DNA

SEQ ID NO: 144 - DNA, 869 bp, synthetic construct
  misc_feature 1..869: note = segment 8-3
  source 1..869: mol_type = other DNA
cacctgcgatccctgtagggcctgcggggtctattgggaaccaagctggagtgcagtggcacaatcttggctcactgcaatctccgcctcctgggttcaagcgattctcctgcctcagcctcccgagttgttgggattccaggcatgcatgaccaggctcagctaatttttgtttttttggtagagacggggtttcaccatattggccaggctggtctccaactcctaatctcaggtgatctacccaccttggcctcccaaattgctgggattacaggcgtgaaccactgctcccttccctgtccttcgcggtacccctagtgatggagttggccactccctctatgcgcgctcgctcgctcggtggggcctgcggaccaaaggtccgcagacggcagagctctgctctgccggccccaccgagcgagcgagcgcgcatagagggagtggccaaggcctgattggccgtagatgtagcgggagagccaggtgatgccggccgaggtggtcgcggccctggtgaattcgcgaacgcggttccagatgttgcgcagggggcgaaagcgttccatggtgggcacgctctgccccgtgaggcgggcgcagtcctgtacgctctagatggaaaaaagacagggcggtcatcgactcccttccgtagctcggggggtaaagtcgcaagggtgcggcggcggggaaccccggttcgaaaccggccggatccgccgctcccgatgcgcctggccccgcatccacgacgtccgcgccgagacccagccgcgacgctccgccccaatacggaggggagtcttttggtgttttttcgtagatgcatccggtgctgcggcagatgcgaccgatcgcaggtg

SEQ ID NO: 145 - DNA, 850 bp, synthetic construct
  misc_feature 1..850: note = segment 8-4
  source 1..850: mol_type = other DNA
ggtctcggaccccagacgcccaccaccaccgccgcggcggcagtaaacctgagcggaggcggtgacagggaggaggaggagcccaccatggatctgctcaccggagtgcccaacagcatgcttcacagcccccaggtcgcccccaccctgcgccgtaaccaggaacacctgtatcgctttctggggaaacactctgcctattttcgccgccaccggcagcgcatcgaacgggccacggccttcgaaagcatgagccaaagagtgtaatcaataaaaaccatttttatttgacatgctacgagcttctggcgtttttattaaaaatcgaagggttcgagggaggggtcctcgtgcccactggggagggacacgttgcgatactggaaacgggcgctccaacgaaactcggggatcaccagccgcggcaggggcacgtcttctaggttctgcttccaaaactgccgcaccagctgcagggctcccatgacgtcgggcgccgatatcttgaagtcgcagttagggccggagctcccgcggctgttgcggaacacggggttggcacactggaacaccatcacgctggggttgtgaatactagccagggccgttgggtcggtcacctccgacgcatccagatcctcggcgttgctcagggcgaacggggtcagcttgcacatctgccgcccgatctggggcaccaggtcgggtttgttgaggcaatcgcagcgcagagggatcaggatgcgacgctgcccgcgttgcatgatagggtaactcgctgccaggaactcctccatctgacggaaggccatctgggctttcgtgccctcggtgaaaaagagcggagacc

SEQ ID NO: 146 - DNA, 864 bp, synthetic construct
  misc_feature 1..864: note = segment 8-5
  source 1..864: mol_type = other DNA
cacctgcgatcgagcccacaggacttgctagagaatacgttattgccgcagttgatgtcttccgagcagcagcgggcgtcttcattcttcagctgaaccacgttgcgaccccagcggttctggaccaccttggctttcgtaggatgctccttcaacgcccgctgaccgttctcgctggtcacatccatttccaccacgtgctccttgcagaccatctccactccgtggaagcagaacaggacgccctcctgccgggtattgcgatgctcccacacggcgcacccggtgggctcccagctcttgcgtttcacccccgcgtatgcttccatgtaagccatgaggaatctgcccatcagctcggtgaaggtcttctggttggtgaaggtcagcggcaggccgcggtgctcctcgttcaaccaagtttgacagatcttgcggtacacggctccctggtcgggcagaaacttaaaagcccctctgctctcgttgtccacgtggaacttctccatcaacaccgtcatgacttccatgcccttctcccaggcagtcaccagcggcgcgctctcggggttcttcaccaacacggcggtggaggggccctcgccggccccgacgtccttcatggtcattctttgaaactccacggtgccgtccgcgcggcgtactctgcgcatcggagggtagctgaagcccacctccaccacggtgccttcgccctcgctgtcggagacaatctccggggatggcggcggcgcaagtgttgccttgcgagccttcttcttgggagggagcggaggcacctcctgctcgcgctcggggctcatctcccgcaagtagggggttatggagctgcgatcgcaggtg

SEQ ID NO: 147 - DNA, 849 bp, synthetic construct
  misc_feature 1..849: note = segment 8-6
  source 1..849: mol_type = other DNA
ggtctcgctgcctgcttggttctgacggttggccattgtatcctaggcagaaagacatggagcttatgcgcgaggaaactttaaccgccccgtcccccgtcagcgacgaagatgtcatcgtcgaacaggacccgggctacgttacgccgcccgaggatctggaggggcctgaccggcgcgacgctagtgagcggcaggaaaatgagaaagagaaggcacagggctgctaccttctggacggcgacgttttgctaaagcatttcgccaggcagagcaccatagtcaaggaggccttgcaagaccgctccgaggtgcccttggacgtcgccgcgctctcccaggcctacgaggcgaaccttttctcgccccgagtgcctccgaagagacagcccaacggcacctgcgagcccaacccgcgactcaacttctaccccgtattcgccgtgcccgaggcgctggccacctatcacatctttttcaaaaaccagcgcatccccctctcgtgccgggccaaccgcaccgcggccgataggaagctcaggcttaaaaacggagccgacatacctgatatcacgtcgctggaggaagtgcccaagattttcgagggtctgggtcgagatgaaaagcgggcggcgaacgctctgcagaaagaacagaaagagagtcagaacgtgctggtggagctggagggggacaacgcgcgtctggccgtcctcaaacgctgcatagaagtctcccacttcgcctaccccgccctcaacttgccacccaaagttatgaaatcggtcatggatcagctgctcatcaagagagctgagcccctggatcccgaccaccccgagggagacc

SEQ ID NO: 148 - DNA, 857 bp, synthetic construct
  misc_feature 1..857: note = segment 8-7
  source 1..857: mol_type = other DNA
cacctgcgatccgaggcggaaaactcagaggacggaaagcccgtcgtcagcgacgaggagctcgagcggtggctggaaaccagggacccccaacagttgcaagagaggcgcaagatgatgatggcggccgtgctggtcaccgtggagctggaatgcctgcaacggtttttcagcgacgtggagacgctacgcaaaatcggggagtccctgcactacaccttccgccagggctacgtccgccaggcctgcaagatctccaacgtggagctcagcaacctggtctcctacatgggcatcctccacgagaaccgactggggcagagcgtgctgcactgcaccttgcaaggcgaggcgcggcgggactacgtgcgagactgcatctacctcttcctcaccctcacctggcagaccgccatgggcgtctggcagcagtgcttggaagagagaaacctcaaagagctagacaaactcctctgccgccagcggcgcgccctgtggtccggtttcagcgagcgcacggtcgccagcgctctggcggacatcatcttcccggagcgcctgatgaaaaccttgcaaaacggcctgccggatttcatcagtcaaagcattttgcaaaacttccgctcttttgtcctggaacgctccgggattttgcccgccatgagctgcgcgctaccctctgactttgtccccctctcctaccgcgagtgccctcccccactgtggagccactgctacctcttccaactggccaactttctggcctaccactccgacctcatggaagacgtaagcggagagggtttactggagtgccactgccgctgcaacctgtgcaccccccacgatcgcaggtg

SEQ ID NO: 149 - DNA, 850 bp, synthetic construct
  misc_feature 1..850: note = segment 8-8
  source 1..850: mol_type = other DNA
ggtctcgccacagatcgctggcctgcaacaccgagctgctcagcgaaacccaggtcataggtaccttcgagatccagggaccccagcagcaagagggtgcttccggcttgaagctcactccggcgctgtggacctcggcttacttacgcaaatttgtagccgaggactaccacgcccacaaaattcagttttacgaagaccaatctcgaccaccgaaagcccccctcacggcctgcgtcatcacccagagcaagatcctggcccaattgcaatccatcaaccaagcgcgccgagatttccttttgaaaaagggtcggggggtgtacttagacccccagaccggcgaggaactcaacccgtccacactctccgtcgaagcagcccccccgagacatgccgcccaagggaaccgccaagcagctgatcgctcggcagagagcgaagaagcaagagctgctccagcagcaggtggaggacgaggaagagctgtgggacagccaggcagaggaggtgtcagaggacgaggaggagatggaaagctgggacagcctaggcgaggaggaggacgagctttcagaggaagaggcgaccgaagaaaaaccacctgcatccagcgcgccttctctgagccgacagccgaagccccggcccccgacgcccccggccggctcactcaaagccagccgtaggtgggacgccaccggatctccagcggcagcggcagcgggtaaggccaaacgcgagcggcgggggtattgctcatggcgggcccacaaaagcagtatcgtgaactgcttgcaacactgcgggggaaacatctcctttgcccgacgctacctcctcggagacc

SEQ ID NO: 150 - DNA, 863 bp, synthetic construct
  misc_feature 1..863: note = segment 8-9
  source 1..863: mol_type = other DNA
cacctgcgatccctcttccatcacggtgtggccttccctcgcaacgttctctattattaccgtcatctctacagcccctacgaaacgctcggagaaaaaagctaaggcctcctctgccgcgaggaaaaactccgccgccgctgccgccaaggatccaccggccaccgaggagctgagaaagcgcatctttcccactctgtatgctatctttcagcaaagccgcgggcagcaccctcagcgcgaactgaaaataaaaaaccgctccttccgctcactcacccgcagctgtctgtaccacaagagagaagaccagctgcagcgcaccctggacgacgccgaagcactgttcagcaaatactgctcagcgtctcttaaagactaaaagacccgcgctttttccccctcggccgccaaaacccacgtcatcgccagcatgagcaaggagattcccaccccctacatgtggagttatcagccccagatgggtctggccgcgggcgccgcccaggactactccagcaagatgaactggctcagcgccggcccccacatgatctcacgagttaacggcatccgagcccaccgaaaccagattctcttagaacaggcggcaatcaccgccacaccccggcgccaactcaacccgcccagttggcccgccgcccaggtgtatcaggaaactccccgcccgaccacagtcctcctgccacgcgacgcggaggccgaagtcctcatgactaactctggggtacaattagcgggcgggtccaggtacgccaggtacagaggtcgggccgctccttactctcccgacttgtatacagggtgacctttctatgcccgtaccgtaccgatcgcaggtg

SEQ ID NO: 151 - DNA, 858 bp, synthetic construct
  misc_feature 1..858: note = segment 8-10
  source 1..858: mol_type = other DNA
ggtctcgtaccaaatacagtacaactatggaccaactggctactcctttaaatttatttggagaactgtttcaagacaaccatttgacatcccatgctgttttttctcttacattacggaagaataaaacaacttttcctttttattttctttttattttacacgcacagtaaggcttcctccgcccttccatttgacagcatacaccagcctctctcccttcatggcagtaaactgctgcgagccagtccggtatttgggagttaagatccaaacagtctctttggtaatcagatgtcgatccgtgatggacacaaatccctggggcaggttctccaacgtttcggtgaaaaactgcatgccgtcctacaaaacaaacaggttcaggctctccacgggttatctccccgatcaaactcagacagggtaaaggtgcgatgatgttccactaaaccacgcaggtggcgctgtctgaacctctcggtgcgactcctgtgaggctggtaagaagttagattgtccagcagcctcacagcatggatcatcagtctacgagtgcgtctggcgcagcagcgcatctgaatctcactgagattccggcaagaatcgcacaccatcacaatcaggttgttcatgatcccatagctgaacacgctccagccaaagctcattcgctccaacagcgccaccgcgtgtccgtccaaccttactttaacataaatcaggtgtctgccgcgtacaaacatgctacccgcatacagaacctcccggggcagtcccctgttcaccacctgcctgtaccagggaaacctcacatttatcagggagccatagatagccatcttaaaccaggagacc

SEQ ID NO: 152 - DNA, 862 bp, synthetic construct
  misc_feature 1..862: note = segment 8-11
  source 1..862: mol_type = other DNA
cacctgcgatcaccaattagctaacaccgccccaccagctctacactgaagagaaccgggagagttacaatgacagtgaataatccatctctcataacccctaatggtctgatggaaatccagatctaacgtggcacagcagatacacactttcatatacattttcatcacatgtttttcccaggccgttaaaatacaatcccaatacacgggccactcctgcagtacaataaagctaatacaagatggtatactcctcacctcactaacattgtgcatgttcatattttcacattctaagtaccgagagttctcctctacaacagcactgccgcggtcctcacaaggtggtagctggtgacgattgtagggagccagtctgcagcgataccgtctgtcgcgttgcatcgtagaccagggaccgacgcacttcctcgtacttgtggtagcagaaccacgtccgccgccaacaggtctccacgtaacgccggtccctgcgtcgctcgcgctctctcctcagtgcaaagtgcaaccactcttgtaatccacacagatccctctcggcctccggggcgatgcacacctcaaacctacagatgtctcggtacagttccaaacacgtagtgagggcgagttccaaccaagacagacagcctgatctatcccgacacactggaggtggaggaagacacggaagaggcatgttattccaagcgattcaccaacgggtcgaaatgaagatcccgaagatgacaacggtcgcctccggagccctgatggaatttaacagccagatcaaacattatgcgattttccaggctatcaatcgcggcctccaaaagagcctggacgatcgcaggtg

SEQ ID NO: 153 - DNA, 845 bp, synthetic construct
  misc_feature 1..845: note = segment 8-12
  source 1..845: mol_type = other DNA
ggtctcgggacccgcacttccacaaacaccagcaaagcaaaagcgttattatcaaactcttcgatcatcaagctgcaggactgtacaatgcccaagtaattttcatttctccactcgcgaatgatgtcgcggcaaatagtctgaaggttcatgccgtgcatattaaaaagctccgaaagggcgccctctatagccatgcgtagacacaccatcatgactgcaagatatcgggctcctgagacacctgcagcagatttaacagacccaggtcaggttgctctccgcgatcgcgaatctccatccgcaaggtcatttgcaaataattaaatagatctgcgccgactaaatctgttaactccgcgctaggaactaaatcaggtgtggctacgcagcacaaaagttccagggatggcgccaaactcactagaaccgctcccgagtagcaaaactgatgaatgggagtaacacagtgtaaaatgttcagccaaaaatcactaagctgctcctttaaaaagtccagtacttctatattcagtccgtgcaagtactgaagcaactgtgcgggaatatgcacagcaaaaaaaatagggcggctcagatacatgttgacctaaaataaaaataaacattaaactaaagaagcttggcgaacggtgggatatatgacacgctccagcagcaggcaagcaaccggctgtccccgggaaccgcggtaaaattcatccgaatgattaaaaagaacaacagaaacttcccaccatgtactcggttggatctcctgagcacacagcaatacccccctcacattcatatccgccacagaaaaaaaacgtcccagggagacc

SEQ ID NO: 154 - DNA, 853 bp, synthetic construct
  misc_feature 1..853: note = segment 8-13
  source 1..853: mol_type = other DNA
ggtctcgccagatacccagtgggaatatccaacgacagctgcaaagacagcaaaataatccctctgggagcaagcacaaaatcctccggtgaaaaaagaacatacatattagaataaccctgttgctggggcaaaaaggcccgacgtcccagcaaatgcacatatatatgttgatcagccattgccccgtcttaccgcgtataaagccacgaaaaagtcgagctaaaatccacccaacagcctatagctatatatacactccgcccaatgacgctaacaccgcaccacccacgaccaaagttcacccacacccacaaaacccgcgaaaatccagcgccgtcagcacttccgcaatttcagtctcacaacgtcacttccgcgcgccttttcactttcccacacacgcccttcgcccgccctcgcgccaccccgcgtcaccccgcgtcaccgggcctatgtggccaagcgcctcccacgctgccgcgtcagcgctgacgtaaatcacgtcataggggagtggtcctgtattagctgtcacgtgagtgcttttgcgacattttgcgacaccacgtggccatttgaggtatatatggccgagtgagcgagcaggatctccattttgaccgcgaaatttgaacgagcagcagccatgccgggtttctacgagatcgtgatcaaggtgccgagcgacctggacgagcacctgccgggcatttctgactcgtttgtgaactgggtggccgagaaggaatgggagctgcccccggattctgacatggatctgaatctgatcgagcaggcacccctgaccgtggccgagaagctgcagcgcgacttcctggtccaggagacc

SEQ ID NO: 155 - DNA, 864 bp, synthetic construct
  misc_feature 1..864: note = segment 8-14
  source 1..864: mol_type = other DNA
cacctgcgatctccaatggcgccgcgtgagtaaggctccggaggccctgttctttgttcagttcgagaagggcgagagctacttccaccttcacgttctggtggagaccacgggggtcaagtccatggtgctaggccgcttcctgagtcagattcgggagaagctggtccagaccatctaccgcggggtcgagcccacgctgcccaactggttcgcggtgaccaagacgcgtaatggcgccggcggggggaacaaggtggtggacgagtgctacatccccaactacctcctgcccaagacccagcccgagctgcagtgggcgtggactaacatggaggagtatataagcgcgtgtttgaacctggccgaacgcaaacggctcgtggcgcagcacctgacccacgtcagccagacgcaggagcagaacaaggagaatctgaaccccaattctgacgcgcccgtgatcaggtcaaaaacctccgcgcgctacatggagctggtcgggtggctggtggaccggggcatcacctccgagaagcagtggatccaggaggaccaggcctcgtacatctccttcaacgccgcctccaactcgcggtcccagatcaaggccgcgctggacaatgccggcaagatcatggcgctgaccaaatccgcgcccgactacctggtggggccctcgctgcccgcggacattaaaaccaaccgcatctaccgcatcctggagctgaacgggtacgatcctgcctacgccggctccgtctttctcggctgggcccagaaaaagttcgggaagcgcaacaccatctggctgtttgggcccgccaccaccggcaagaccaacattgcggaagatcgcaggtg

SEQ ID NO: 156 - DNA, 890 bp, synthetic construct
  misc_feature 1..890: note = segment 8-15
  source 1..890: mol_type = other DNA
cacctgcgatcggaagccatcgcccacgccgtgcccttctacggctgcgtcaactggaccaatgagaactttcccttcaacgattgcgtcgacaagatggtgatctggtgggaggagggcaagatgacggccaaggtcgtggagtccgccaaggccattctcggcggcagcaaggtgcgcgtggaccaaaagtgcaagtcgtccgcccagatcgaccccacccccgtgatcgtcacctccaacaccaacatgtgcgccgtgattgacgggaacagcaccaccttcgagcaccagcagccgttgcaggaccggatgttcaaatttgaactcacccgccgtctggagcacgactttggcaaggtgacgaagcaggaagtcaaagagttcttccgctgggccagtgatcacgtgaccgaggtggcgcatgagttctacgtcagaaagggcggagccagcaaaagacccgcccccgatgacgcggatataagcgagcccaagcgggcctgcccctcagtcgcggatccatcgacgtcagacgcggaaggagctccggtggactttgccgacaggtaccaaaacaaatgttctcgtcacgcgggcatgattcagatgctgtttccctgcaaaacgtgcgagagaatgaatcagaatttcaacatttgcttcacacacggggtcagagactgtttagagtgtttccccggcgtgtcagaatctcaaccggtcgtcagaaaaaagacgtatcggaaactctgcgcgattcatcatctgctggggcgggcgcccgagattgcttgctcggcctgcgacctggtcaacgtggacctggacgactgcgtttctgagcaataaatgacttaaaccaggtggcctctatgggatcgcaggtg

SEQ ID NO: 157 - DNA, 865 bp, synthetic construct; identical to SEQ ID NO: 22
  misc_feature 1..865: note = segment 8-16
  source 1..865: mol_type = other DNA

SEQ ID NO: 158 - DNA, 871 bp, synthetic construct; identical to SEQ ID NO: 23
  misc_feature 1..871: note = segment 8-17
  source 1..871: mol_type = other DNA

SEQ ID NO: 159 - DNA, 872 bp, synthetic construct; identical to SEQ ID NO: 24
  misc_feature 1..872: note = segment 8-18
  source 1..872: mol_type = other DNA

SEQ ID NO: 160 - DNA, 31030 bp, synthetic construct
  misc_feature 1..31030: note = seed plasmid 1
  source 1..31030: mol_type = other DNA
gcggccgccctgcaggcagctgcgcgctcgctcgctcactgaggccgcccgggcaaagcccgggcgtcgggcgacctttggtcgcccggcctcagtgagcgagcgagcgcgcagagagggagtggccaactccatcactaggggttcctggccttgatggccaattcgattcgattagggcctacttggcctaatagtaatcaattacggggtcattagttcatagcccatatatggagttccgcgttacataacttacggtaaatggcccgcctggctgaccgcccaacgacccccgcccattgacgtcaataatgacgtatgttcccatagtaacgccaatagggactttccattgacgtcaatgggtggagtatttacggtaaactgcccacttggcagtacatcaagtgtatcatatgccaagtacgccccctattgacgtcaatgacggtaaatggcccgcctggcattatgcccagtacatgaccttatgggactttcctacttggcagtacatctacgtattagtcatcgctattaccatggtgatgcggttttggcagtacatcaatgggcgtggatagcggtttgactcacggggatttccaagtctccaccccattgacgtcaatgggagtttgttttggcaccaaaatcaacgggactttccaaaatgtcgtaacaactccgccccattgacgcaaatgggcggtaggcgtgtacggtgggaggtctatataagcagagctggtttagtgaaccgtcagatgccaccatggtgagcaagggcgaggagctgttcaccggggtggtgcccatcctggtcgagctggacggcgacgtaaacggccacaagttcagcgtgtccggcgagggcgagggcgatgccacctacggcaagctgaccctgaagttcatctgcaccaccggcaagctgcccgtgccctggcccaccctcgtgaccaccctgacctacggcgtgcagtgcttcagccgctaccccgaccacatgaagcagcacgacttcttcaagtccgccatgcccgaaggctacgtccaggagcgcaccatcttcttcaaggacgacggcaactacaagacccgcgccgaggtgaagttcgagggcgacaccctggtgaaccgcatcgagctgaagggcatcgacttcaaggaggacggcaacatcctggggcacaagctggagtacaactacaacagccacaacgtctatatcatggccgacaagcagaagaacggcatcaaggtgaacttcaagatccgccacaacatcgaggacggcagcgtgcagctcgccgaccactaccagcagaacacccccatcggcgacggccccgtgctgctgcccgacaaccactacctgagcacccagtccgccctgagcaaagaccccaacgagaagcgcgatcacatggtcctgctggagttcgtgaccgccgccgggatcactctcggcatggacgagctgtacaagtaagggtggcatccctgtgacccctccccagtgcctctcctggccctggaagttgccactccagtgcccaccagccttgtcctaataaaattaagttgcatcattttgtctgactaggtgtccttctataatattatggggtggaggggggtggtatggagcaaggggcaagttgggaagacaacctgtagggcctgcggggtctattgggaaccaagctggagtgcagtggcacaatcttggctcactgcaatctccgcctcctgggttcaagcgattctcctgcctcagcctcccgagttgttgggattccaggcatgcatgaccaggctcagctaatttttgtttttttggtagagacggggtttcaccatattggccaggctggtctccaactcctaatctcaggtgatctacccaccttggcctcccaaattgctgggattacaggcgtgaaccactgctcccttccctgtccttccttgcttgagagtgtggcactctcccccctgtcgcgttcgctcgctcgctggctcgtttgggggggtggcagctcaaagagctgccagacgacggccctctggccgtcgcccccccaaacgagccagcgagcgagcgaacgcgacaggggggagagggcctgattggccatccgtagatgtacctggacatccaggtgatgccggcggcggtggtggaggcgcgcggaaagtcgcggacgcggttccagatgttgcgcagcggcaaaaagtgctccatggtcgggacgctctggccggtgaggcgtgcgcagtcgttgacgctctagaccgtgcaaaaggagagcctgtaagcgggcactcttccgtggtctggtggataaattcgcaagggtatcatggcggacgaccggggttcgaaccccggatccggccgtccgccgtgatccatgcggttaccgcccgcgtgtcgaacccaggtgtgcgacgtcagacaacgggggagcgctccttttggcttccttccaggcgcggcggctgctgcgctagcttttttggccactggccgcgcgcggcgtaagcggttaggctggaaagcgaaagcattaagtggctcgctccctgtagccggagggttattttccaagggttgagtcgcaggacccccggttcgagtctcgggccggccggactgcggcgaacgggggtttgcctccccgtcatgcaagaccccgcttgcaaattcctccggaaacagggacgagccccttttttgcttttcccagatgcatccggtgctgcggcagatgcgcccccctcctcagcagcggcaagagcaagagcagcggcagacatgcagggcaccctccccttctcctaccgcgtcaggaggggcaacatccggtacccaactccatgcttaacagtccccaggtacagcccaccctgcgtcgcaaccaggaacagctctacagcttcctggagcgccactcgccctacttccgcagccacagtgcgcagattaggagcgccacttctttttgtcacttgaaaaacatgtaaaaataatgtactaggagacactttcaataaaggcaaatgtttttatttgtacactctcgggtgattatttaccccccacccttgccgtctgcgccgtttaaaaatcaaaggggttctgccgcgcatcgctatgcgccactggcagggacacgttgcgatactggtgtttagtgctccacttaaactcaggcacaaccatccgcggcagctcggtgaagttttcactccacaggctgcgcaccatcaccaacgcgtttagcaggtcgggcgccgatatcttgaagtcgcagttggggcctccgccctgcgcgcgcgagttgcgatacacagggttgcagcactggaacactatcagcgccgggtggtgcacgctggccagcacgctcttgtcggagatcagatccgcgtccaggtcctccgcgttgctcagggcgaacggagtcaactttggtagctgccttcccaaaaagggtgcatgcccaggctttgagttgcactcgcaccgtagtggcatcagaaggtgaccgtgcccggtctgggcgttaggatacagcgcctgcatgaaagccttgatctgcttaaaagccacctgagcctttgcgccttcagagaagaacatgccgcaagacttgccggaaaactgattggcaggacaggccgcgtcatgcacgcagcaccttgcgtcggtgttggagatctgcaccacatttcggccccaccggttcttcacgatcttggccttgctagactgctccttcagcgcgcgctgcccgttttcgctcgtcacatccatttcaatcacgtgctccttatttatcataatgctcccgtgtagacacttaagctcgccttcgatctcagcgcagcggtgcagccacaacgcgcagcccgtgggctcgtggtgcttgtaggttacctctgcaaacgactgcaggtacgcctgcaggaatcgccccatcatcgtcacaaaggtcttgttgctggtgaaggtcagctgcaacccgcggtgctcctcgtttagccaggtcttgcatacggccgccagagcttccacttggtcaggcagtagcttgaagtttgcctttagatcgttatccacgtggtacttgtccatcaacgcgcgcgcagcctccatgcccttctcccacgcagacacgatcggcaggctcagcgggtttatcaccgtgctttcactttccgcttcactggactcttccttttcctcttgcgtccgcataccccgcgccactgggtcgtcttcattcagccgccgcaccgtgcgcttacctcccttgccgtgcttgattagcaccggtgggttgctgaaacccaccatttgtagcgccacatcttctctttcttcctcgctgtccacgatcacctctggggatggcgggcgctcgggcttgggagaggggcgcttctttttctttttggacgcaatggccaaatccgccgtcgaggtcgatggccgcgggctgggtgtgcgcggcaccagcgcatcttgtgacgagtcttcttcgtcctcggactcgagacgccgcctcagccgcttttttgggggcgcgcggggaggcggcggcgacggcgacggggacgacacgtcctccatggttggtggacgtcgcgccgcaccgcgtccgcgctcgggggtggtttcgcgctgctcctcttcccgactggccatttccttctcctataggcagaaaaagatcatggagtcagtcgagaaggaggacagcctaaccgccccctttgagttcgccaccaccgcctccaccgatgccgccaacgcgcctaccaccttccccgtcgaggcacccccgcttgaggaggaggaagtgattatcgagcaggacccaggttttgtaagcgaagacgacgaggatcgctcagtaccaacagaggataaaaagcaagaccaggacgacgcagaggcaaacgaggaacaagtcgggcggggggaccaaaggcatggcgactacctagatgtgggagacgacgtgctgttgaagcatctgcagcgccagtgcgccattatctgcgacgcgttgcaagagcgcagcgatgtgcccctcgccatagcggatgtcagccttgcctacgaacgccacctgttctcaccgcgcgtaccccccaaacgccaagaaaacggcacatgcgagcccaacccgcgcctcaacttctaccccgtatttgccgtgccagaggtgcttgccacctatcacatctttttccaaaactgcaagatacccctatcctgccgtgccaaccgcagccgagcggacaagcagctggccttgcggcagggcgctgtcatacctgatatcgcctcgctcgacgaagtgccaaaaatctttgagggtcttggacgcgacgagaaacgcgcggcaaacgctctgcaacaagaaaacagcgaaaatgaaagtcactgtggagtgctggtggaacttgagggtgacaacgcgcgcctagccgtgctgaaacgcagcatcgaggtcacccactttgcctacccggcacttaacctaccccccaaggttatgagcacagtcatgagcgagctgatcgtgcgccgtgcacgacccctggagagggatgcaaacttgcaagaacaaaccgaggagggcctacccgcagttggcgatgagcagctggcgcgctggcttgagacgcgcgagcctgccgacttggaggagcgacgcaagctaatgatggccgcagtgcttgttaccgtggagcttgagtgcatgcagcggttctttgctgacccggagatgcagcgcaagctagaggaaacgttgcactacacctttcgccagggctacgtgcgccaggcctgcaaaatttccaacgtggagctctgcaacctggtctcctaccttggaattttgcacgaaaaccgcctcgggcaaaacgtgcttcattccacgctcaagggcgaggcgcgccgcgactacgtccgcgactgcgtttacttatttctgtgctacacctggcaaacggccatgggcgtgtggcagcaatgcctggaggagcgcaacctaaaggagctgcagaagctgctaaagcaaaacttgaaggacctatggacggccttcaacgagcgctccgtggccgcgcacctggcggacattatcttccccgaacgcctgcttaaaaccctgcaacagggtctgccagacttcaccagtcaaagcatgttgcaaaactttaggaactttatcctagagcgttcaggaattctgcccgccacctgctgtgcgcttcctagcgactttgtgcccattaagtaccgtgaatgccctccgccgctttggggtcactgctaccttctgcagctagccaactaccttgcctaccactccgacatcatggaagacgtgagcggtgacggcctactggagtgtcactgtcgctgcaacctatgcaccccgcaccgctccctggtctgcaattcgcaactgcttagcgaaagtcaaattatcggtacctttgagctgcagggtccctcgcctgacgaaaagtccgcggctccggggttgaaactcactccggggctgtggacgtcggcttaccttcgcaaatttgtacctgaggactaccacgcccacgagattaggttctacgaagaccaatcccgcccgccaaatgcggagcttaccgcctgcgtcattacccagggccacatccttggccaattgcaagccatcaacaaagcccgccaagagtttctgctacgaaagggacggggggtttacctggacccccagtccggcgaggagctcaacccaatccccccgccgccgcagccctatcagcagccgcgggcccttgcttcccaggatggcacccaaaaagaagctgcagctgccgccgccgccacccacggacgaggaggaatactgggacagtcaggcagaggaggttttggacgaggaggaggagatgatggaagactgggacagcctagacgaagcttccgaggccgaagaggtgtcagacgaaacaccgtcaccctcggtcgcattcccctcgccggcgccccagaaattggcaaccgttcccagcatcgctacaacctccgctcctcaggcgccgccggcactgcctgttcgccgacccaaccgtagatgggacaccactggaaccagggccggtaagtctaagcagccgccgccgttagcccaagagcaacaacagcgccaaggctaccgctcgtggcgcgggcacaagaacgccatagttgcttgcttgcaagactgtgggggcaacatctccttcgcccgccgctttcttctctaccatcacggcgtggccttcccccgtaacatcctgcattactaccgtcatctctacagcccctactgcaccggcggcagcggcagcggcagcaacagcagcggtcacacagaagcaaaggcgaccggatagcaagactctgacaaagcccaagaaatccacagcggcggcagcagcaggaggaggagcgctgcgtctggcgcccaacgaacccgtatcgacccgcgagcttagaaataggatttttcccactctgtatgctatatttcaacaaagcaggggccaagaacaagagctgaaaataaaaaacaggtctctgcgctccctcacccgcagctgcctgtatcacaaaagcgaagatcagcttcggcgcacgctggaagacgcggaggctctcttcagcaaatactgcgcgctgactcttaaggactagtttcgcgccctttctcaaatttaagcgcgaaaactacgtcatctccagcggccacacccggcgccagcacctgtcgtcagcgccattatgagcaaggaaattcccacgccctacatgtggagttaccagccacaaatgggacttgcggctggagctgcccaagactactcaacccgaataaactacatgagcgcgggaccccacatgatatcccgggtcaacggaatccgcgcccaccgaaaccgaattctcctcgaacaggcggctattaccaccacacctcgtaataaccttaatccccgtagttggcccgctgccctggtgtaccaggaaagtcccgctcccaccactgtggtacttcccagagacgcccaggccgaagttcagatgactaactcaggggcgcagcttgcgggcggctttcgtcacagggtgcggtcgcccgggcctagtgaatccacagaaactagcgaggtaagcacttactctatgtcttttacatggtcctgggaaagtggaaaatacaccactgaaacttttgctaccaactcttacaccttctcctacattgcccaggaataaagaatcgtgaacctgttgcatgttatgtttcaacgtgtttatttttcaattgcagaaaatttcaagtcatttttcattcagtagtatagccccaccaccacatagcttatattgatcaccgtaccttaatcaaactcacagaaccctagtattcaacctgccacctccctcccaacacacagagtacacagtcctttctccccggctggccttaaaaagcatcatatcatgggtaacagacatattcttaggtgttatattccacacggtttcctgtcgagccaaacgctcatcagtgatattaataaactccccgggcagctcgcttaagttcatgtcgctgtccagctgctgagccacaggctgctgtccaacttgcggttgctcaacgggcggcgaaggggaagtccacgcctacatgggggtagagtcataatcgtgcatcaggatagggcggtggtgctgcagcagcgcgcgaataaactgctgccgccgccgctccgtcctgcaggaatacaacatggcagtggtctcctcagcgatgattcgcaccgcccgcagcatgagacgccttgtcctccgggcacagcagcgcaccctgatctcacttaaatcagcacagtaactgcagcacagcaccacaatattgttcaaaatcccacagtgcaaggcgctgtatccaaagctcatggcggggaccacagaacccacgtggccatcataccacaagcgcaggtagattaagtggcgacccctcataaacacgctggacataaacattacctcttttggcatgttgtaattcaccacctcccggtaccatataaacctctgattaaacatggcgccatccaccaccatcctaaaccagctggccaaaacctgcccgccggctatgcactgcagggaaccgggactggaacaatgacagtggagagcccaggactcgtaaccatggatcatcatgctcgtcatgatatcaatgttggcacaacacaggcacacgtgcatacacttcctcaggattacaagctcctcccgcgtcagaaccatatcccagggaacaacccattcctgaatcagcgtaaatcccacactgcagggaagacctcgcacgtaactcacgttgtgcattgtcaaagtgttacattcgggcagcagcggatgatcctccagtatggtagcgcgggtctctgtctcaaaaggaggtaggcgatccctactgtacggagtgcgccgagacaaccgagatcgtgttggtcgtagtgtcatgccaaatggaacgccggacgtagtcatatttcctgaagcaaaaccaggtgcgggcgtgacaaacagatctgcgtctccggtctcgtcgcttagctcgctctgtgtagtagttgtagtatatccactctctcaaagcatccaggcgccccctggcttcgggttctatgtaaactccttcatgcgccgctgccctgataacatccaccaccgcagaataagccacacccagccaacctacacattcgttctgcgagtcacacacgggaggagcgggaagagctggaagaaccatgttttttttttttttattccaaaagattatccaaaacctcaaaatgaagatctattaagtgaacgcgctcccctccggtggcgtggtcaaactctacagccaaagaacagataatggcatttgtaagatgttgcacaatggcttccaaaaggcaaactgccctcacgtccaagtggacgtaaaggctaaacccttcagggtgaatctcctctataaacattccagcaccttcaaccatgcccaaataattttcatctcgccaccttatcaatatgtctctaagcaaatcccgaatattaagtccggccattgtaaaaatctgctccagagcgccctccaccttcagcctcaagcagcgaatcatgattgcaaaaattcaggttcctcacagacctgtataagattcaaaagcggaacattaacaaaaataccgcgatcccgtaggtcccttcgcagggccagctgaacataatcgtgcaggtctgcacggaccagcgcggccacttccccgccaggaaccatgacaaaagaacccacactgattatgacacgcatactcggagctatgctaaccagcgtagcccctatgtaagcttgttgcatgggcggcgatataaaatgcaaggtgctgctcaaaaaatcaggcaaagcctcgcgcaaaaaagcaagcacatcgtagtcatgctcatgcagataaaggcaggtaagttccggaaccaccacagaaaaagacaccatttttctctcaaacatgtctgcgggttcctgcattaaacacaaaataaaataacaaaaaaaaacatttaaacattagaagcctgtcttacaacaggaaaaacaacccttataagcataagacggactacggccatgccggcgtgaccgtaaaaaaactggtcaccgtgattaaaaagcaccaccgacagttcctcggtcatgtccggagtcataatgtaagactcggtaaacacatcaggttggttaacatcggtcagtgctaaaaagcgaccgaaatagcccgggggaatacatacccgcaggcgtagagacaacattacagcccccataggaggtataacaaaattaataggagagaaaaacacataaacacctgaaaaaccctcctgcctaggcaaaatagcaccctcccgctccagaacaacatacagcgcttccacagcggcagccataacagtcagccttaccagtaaaaaaacctattaaaaaacaccactcgacacggcaccagctcaatcagtcacagtgtaaaaagggccaagtacagagcgagtatatataggactaaaaaatgacgtaacggttaaagtccacaaaaaacacccagaaaaccgcacgcgaacctacgcccagaaacgaaagccaaaaaacccacaacttcctcaaatcttcacttccgttttcccacgatacgtcacttcccattttaaaaaaactacaattcccaatacatgcaagttactccgccctaaaacggcctatgtggccgcgcgccgatatcgttaacgccccgcgccggccgctctagaactagtggatcccccggaagatcagaagttcctattccgaagttcctattctctagaaagtataggaacttctgatctgcgcagccgccatgccggggttttacgagattgtgattaaggtccccagcgaccttgacgagcatctgcccggcatttctgacagctttgtgaactgggtggccgagaaggaatgggagttgccgccagattctgacatggatctgaatctgattgagcaggcacccctgaccgtggccgagaagctgcagcgcgactttctgacggaatggcgccgtgtgagtaaggctccggaggcccttttctttgtgcaatttgagaagggagagagctacttccacatgcacgtgctcgtggaaaccaccggggtgaaatccatggttttgggacgtttcctgagtcagattcgcgaaaaactgattcagagaatttaccgcgggatcgagccgactttgccaaactggttcgcggtcacaaagaccagaaatggcgccggaggcgggaacaaggtggtggatgagtgctacatccccaattacttgctccccaaaacccagcctgagctccagtgggcgtggactaatatggaacagtatttaagcgcctgtttgaatctcacggagcgtaaacggttggtggcgcagcatctgacgcacgtgtcgcagacgcaggagcagaacaaagagaatcagaatcccaattctgatgcgccggtgatcagatcaaaaacttcagccaggtacatggagctggtcgggtggctcgtggacaaggggattacctcggagaagcagtggatccaggaggaccaggcctcatacatctccttcaatgcggcctccaactcgcggtcccaaatcaaggctgccttggacaatgcgggaaagattatgagcctgactaaaaccgcccccgactacctggtgggccagcagcccgtggaggacatttccagcaatcggatttataaaattttggaactaaacgggtacgatccccaatatgcggcttccgtctttctgggatgggccacgaaaaagttcggcaagaggaacaccatctggctgtttgggcctgcaactaccgggaagaccaacatcgcggaggccatagcccacactgtgcccttctacgggtgcgtaaactggaccaatgagaactttcccttcaacgactgtgtcgacaagatggtgatctggtgggaggaggggaagatgaccgccaaggtcgtggagtcggccaaagccattctcggaggaagcaaggtgcgcgtggaccagaaatgcaagtcctcggcccagatagacccgactcccgtgatcgtcacctccaacaccaacatgtgcgccgtgattgacgggaactcaacgaccttcgaacaccagcagccgttgcaagaccggatgttcaaatttgaactcacccgccgtctggatcatgactttgggaaggtcaccaagcaggaagtcaaagactttttccggtgggcaaaggatcacgtggttgaggtggagcatgaattctacgtcaaaaagggtggagccaagaaaagacccgcccccagtgacgcagatataagtgagcccaaacgggtgcgcgagtcagttgcgcagccatcgacgtcagacgcggaagcttcgatcaactacgcagacaggtaccaaaacaaatgttctcgtcacgtgggcatgaatctgatgctgtttccctgcagacaatgcgagagaatgaatcagaattcaaatatctgcttcactcacggacagaaagactgtttagagtgctttcccgtgtcagaatctcaacccgtttctgtcgtcaaaaaggcgtatcagaaactgtgctacattcatcatatcatgggaaaggtgccagacgcttgcactgcctgcgatctggtcaatgtggatttggatgactgcatctttgaacaataaatgatttaaatcaggtggcctctatggccatggctgccgatggttatcttccagattggctcgaggacactctctctgaaggaataagacagtggtggaagctcaaacctggcccaccaccaccaaagcccgcagagcggcataaggacgacagcaggggtcttgtgcttcctgggtacaagtacctcggacccttcaacggactcgacaagggagagccggtcaacgaggcagacgccgcggccctcgagcacgacaaagcctacgaccggcagctcgacagcggagacaacccgtacctcaagtacaaccacgccgacgcggagtttcaggagcgccttaaagaagatacgtcttttgggggcaacctcggacgagcagtcttccaggcgaaaaagagggttcttgaacctctgggcctggttgaggaacctgttaagacggctccgggaaaaaagaggccggtagagcactctcctgtggagccagactcctcctcgggaaccggaaaggcgggccagcagcctgcaagaaaaagattgaattttggtcagactggagacgcagactcagtacctgacccccagcctctcggacagccaccagcagccccctctggtctgggaactaatacgatggctacaggcagtggcgcaccaatggcagacaataacgagggcgccgacggagtgggtaattcctcgggaaattggcattgcgattccacatggatgggcgacagagtcatcaccaccagcacccgaacctgggccctgcccacctacaacaaccacctctacaaacaaatttccagccaatcaggagcctcgaacgacaatcactactttggctacagcaccccttgggggtattttgacttcaacagattccactgccacttttcaccacgtgactggcaaagactcatcaacaacaactggggattccgacccaagagactcaacttcaagctctttaacattcaagtcaaagaggtcacgcagaatgacggtacgacgacgattgccaataaccttaccagcacggttcaggtgtttactgactcggagtaccagctcccgtacgtcctcggctcggcgcatcaaggatgcctcccgccgttcccagcagacgtcttcatggtgccacagtatggatacctcaccctgaacaacgggagtcaggcagtaggacgctcttcattttactgcctggagtactttccttctcagatgctgcgtaccggaaacaactttaccttcagctacacttttgaggacgttcctttccacagcagctacgctcacagccagagtctggaccgtctcatgaatcctctcatcgaccagtacctgtattacttgagcagaacaaacactccaagtggaaccaccacgcagtcaaggcttcagttttctcaggccggagcgagtgacattcgggaccagtctaggaactggcttcctggaccctgttaccgccagcagcgagtatcaaagacatctgcggataacaacaacagtgaatactcgtggactggagctaccaagtaccacctcaatggcagagactctctggtgaatccgggcccggccatggcaagccacaaggacgatgaagaaaagttttttcctcagagcggggttctcatctttgggaagcaaggctcagagaaaacaaatgtggacattgaaaaggtcatgattacagacgaagaggaaatcaggacaaccaatcccgtggctacggagcagtatggttctgtatctaccaacctccagagaggcaacagacaagcagctaccgcagatgtcaacacacaaggcgttcttccaggcatggtctggcaggacagagatgtgtaccttcaggggcccatctgggcaaagattccacacacggacggacattttcacccctctcccctcatgggtggattcggacttaaacaccctcctccacagattctcatcaagaacaccccggtacctgcgaatccttcgaccaccttcagtgcggcaaagtttgcttccttcatcacacagtactccacgggacaggtcagcgtggagatcgagtgggagctgcagaaggaaaacagcaaacgctggaatcccgaaattcagtacacttccaactacaacaagtctgttaatgtggactttactgtggacactaatggcgtgtattcagagcctcgccccattggcaccagatacctgactcgtaatctgttgcttgttaatcaataaaccgtttaattcgtttcagttgaactttggtctctgcgtatttctttcttatctagtttccatggctacgtagataagtagcatggcgggttaatcattaactacagcccgggcgtttaaacagcgggcggaggggtggagtcgtgacgtgaattacgtcatagggttagggaggtcctgtattagaggtcacgtgagtgttttgcgacattttgcgacaccatgtggtctcgctgggggggggggcccgagtgagcacgcagggtctccattttgaagcgggaggtttgaacgcggccgcaaaaggccttcttggccaccccgggccgtcgaccaattctcatgtttgacagcttatcatcgaatttctgccattcatccgcttattatcacttattcaggcgtagcaaccaggcgtttaagggcaccaataactgccttaaaaaaattacgccccgccctgccactcatcgcagtactgttgtaattcattaagcattctgccgacatggaagccatcacaaacggcatgatgaacctgaatcgccagcggcatcagcaccttgtcgccttgcgtataatatttgcccatggtgaaaacgggggcgaagaagttgtccatattggccacgtttaaatcaaaactggtgaaactcacccagggattggctgagacgaaaaacatattctcaataaaccctttagggaaataggccaggttttcaccgtaacacgccacatcttgcgaatatatgtgtagaaactgccggaaatcgtcgtggtattcactccagagcgatgaaaacgtttcagtttgctcatggaaaacggtgtaacaagggtgaacactatcccatatcaccagctcaccgtctttcattgccatacggaattccggatgagcattcatcaggcgggcaagaatgtgaataaaggccggataaaacttgtgcttatttttctttacggtctttaaaaaggccgtaatatccagctgaacggtctggttataggtacattgagcaactgactgaaatgcctcaaaatgttctttacgatgccattgggatatatcaacggtggtatatccagtgatttttttctccattttagcttccttagctcctgaaaatctcgataactcaaaaaatacgcccggtagtgatcttatttcattatggtgaaagttggaacctcttacgtgccgatcaacgtctcattttcgccaaaagttggcccagggcttcccggtatcaacagggacaccaggatttatttattctgcgaagtgatcttccgtcacaggtatttattcgcgataagctcatggagcggcgtaaccgtcgcacaggaaggacagagaaagcgcggatctgggaagtgacggacagaacggtcaggacctggattggggaggcggttgccgccgctgctgctgacggtgtgacgttctctgttccggtcacaccacatacgttccgccattcctatgcgatgcacatgctgtatgccggtataccgctgaaagttctgcaaagcctgatgggacataagtccatcagttcaacggaagtctacacgaaggtttttgcgctggatgtggctgcccggcaccgggtgcagtttgcgatgccggagtctgatgcggttgcgatgctgaaacaattatcctgagaataaatgccttggcctttatatggaaatgtggaactgagtggatatgctgtttttgtctgttaaacagagaagctggctgttatccactgagaagcgaacgaaacagtcgggaaaatctcccattatcgtagagatccgcattattaatctcaggagcctgtgtagcgtttataggaagtagtgttctgtcatgatgcctgcaagcggtaacgaaaacgatttgaatatgccttcaggaacaatagaaatcttcgtgcggtgttacgttgaagtggagcggattatgtcagcaatggacagaacaacctaatgaacacagaaccatgatgtggtctgtccttttacagccagtagtgctcgccgcagtcgagcgacagggcgaagccctcgagtgagcgaggaagcaccagggaacagcacttatatattctgcttacacacgatgcctgaaaaaacttcccttggggttatccacttatccacggggatatttttataattattttttttatagtttttagatcttcttttttagagcgccttgtaggcctttatccatgctggttctagagaaggtgttgtgacaaattgccctttcagtgtgacaaatcaccctcaaatgacagtcctgtctgtgacaaattgcccttaaccctgtgacaaattgccctcagaagaagctgttttttcacaaagttatccctgcttattgactcttttttatttagtgtgacaatctaaaaacttgtcacacttcacatggatctgtcatggcggaaacagcggttatcaatcacaagaaacgtaaaaatagcccgcgaatcgtccagtcaaacgacctcactgaggcggcatatagtctctcccgggatcaaaaacgtatgctgtatctgttcgttgaccagatcagaaaatctgatggcaccctacaggaacatgacggtatctgcgagatccatgttgctaaatatgctgaaatattcggattgacctctgcggaagccagtaaggatatacggcaggcattgaagagtttcgcggggaaggaagtggttttttatcgccctgaagaggatgccggcgatgaaaaaggctatgaatcttttccttggtttatcaaacgtgcgcacagtccatccagagggctttacagtgtacatatcaacccatatctcattcccttctttatcgggttacagaaccggtttacgcagtttcggcttagtgaaacaaaagaaatcaccaatccgtatgccatgcgtttatacgaatccctgtgtcagtatcgtaagccggatggctcaggcatcgtctctctgaaaatcgactggatcatagagcgttaccagctgcctcaaagttaccagcgtatgcctgacttccgccgccgcttcctgcaggtctgtgttaatgagatcaacagcagaactccaatgcgcctctcatacattgagaaaaagaaaggccgccagacgactcatatcgtattttccttccgcgatatcacttccatgacgacaggatagtctgagggttatctgtcacagatttgagggtggttcgtcacatttgttctgacctactgagggtaatttgtcacagttttgctgtttccttcagcctgcatggattttctcatactttttgaactgtaatttttaaggaagccaaatttgagggcagtttgtcacagttgatttccttctctttcccttcgtcatgtgacctgatacgcgtgctaccttaagagagtcaattcgcccttcccggtcgatatgaacagcttatttacataattcacgttattggtagttataaatgaaattcctaatatcggttatgaagtgaaattgaatttctacttgatctttctctctatttttgtaaaataaaattaagaatatttaaatattcaatgattcatttttgcagaaatcggaggaagaagaatatatgaaaacatttaacatttctcaacaagatccccccatattgttgtataagtgatgaaatactgaatttaaaacttagtttatatgtggtaaaatgttttaatcaagtttaggaggaattaattatgaagtgtaatgaataatgaatgtaacagggttcaattaaaagagggaagcgtatcattaaccctataaactacgtctgccctcattattggagggtgaaatgtgaatacatcctattcacaatcgaatttacgacacaaccaaattttaatttggctttgcattttatctttttttagcgtattaaatgaaatggttttgaacgtctcattacctgatattgcaaatgattttaataaaccaccagcgagtacaaactgggtgaacacagcctttatgttaaccttttccattggaacagctgtatatggaaagctatctgatcaattaggcatcaaaaggttactcctatttggaattataataaattgtttcgggtcggtaattgggtttgttggccattctttcttttccttacttattatggctcgttttattcaaggggctggtgcagctgcatttccagcactcgtaatggttgtagttgcgcgctatattccaaaggaaaataggggtaaagcatttggtcttattggatcgatagtagccatgggagaaggagtcggtccagcgattggtggaatgatagcccattatattcattggtcctatcttctactcattcctatgataacaattatcactgttccgtttcttatgaaattattaaagaaagaagtaaggataaaaggtcattttgatatcaaaggaattatactaatgtctgtaggcattgtattttttatgttgtttacaacatcatatagcatttcttttcttatcgttagcgtgctgtcattcctgatatttgtaaaacatatcaggaaagtaacagatccttttgttgatcccggattagggaaaaatataccttttatgattggagttctttgtgggggaattatatttggaacagtagcagggtttgtctctatggttccttatatgatgaaagatgttcaccagctaagtactgccgaaatcggaagtgtaattattttccctggaacaatgagtgtcattattttcggctacattggtgggatacttgttgatagaagaggtcctttatacgtgttaaacatcggagttacatttctttctgttagctttttaactgcttcctttcttttagaaacaacatcatggttcatgacaattataatcgtatttgttttaggtgggctttcgttcaccaaaacagttatatcaacaattgtttcaagtagcttgaaacagcaggaagctggtgctggaatgagtttgcttaactttaccagctttttatcagagggaacaggtattgcaattgtaggtggtttattatccatacccttacttgatcaaaggttgttacctatggaagttgatcagtcaacttatctgtatagtaatttgttattacttttttcaggaatcattgtcattagttggctggttaccttgaatgtatataaacattctcaaagggatttctaaatcgttaagggatcaactttgggagagagttcaaaattgatcctttttttataacaggaattgggcatcaaataaaacgaaaggctcagtcgaaagactgggcctttcgttttatctgttgtttgtcggtgaacgctctcctgagtaggacaaatccgccgggagcggatttgaacgttgcgaagcaacggcccggagggtggcgggcaggacgcccgccataaactgccaggcatcaaattaagcagaaggccatcctgacggatggcctttttgcgtttctacaaactcttcctgtcgtcatatctacaattctacacagcccagtccagactattcggcactgaaattatgggtgaagtggtcaagacctcactaggcaccttaaaaatagcgcaccctgaagaagatttatttgaggtagcccttgcctacctagcttccaagaaagatatcctaacagcacaagagcggaaagatgttttgttctacatccagaacaacctctgctaaaattcctgaaaaattttgcaaaaagttgttgactttatctacaaggtgtggcataatgtgtggaattgtgagcggataacaattaagctaattctatggtaaaagcattcctgaacccaatatccttatttttagtggacaaggccttgttctcatatggttgcttgagccagtgccttacaaggctcttccgctttggcaggctgttcaaaattatttattagagcaactcaaggaactaggcggagatccaaaagcaaccgatgcagcacgtgtttttcggattgctgggagcgtcaatagtaagaatggagcggaagtaagagcggaatatcggcacgattacagatatgagttaaggcagattcaatttgattaccttccagaactcaatgaggttattaatcccgctccacaaaagaaaaaacgggggcgtaaaaagaaagtagttcagttattcaatacctacaaactccattacgctcgcctattggatatagtgaaattggtggaactacgaaattatgaggtaactggatacagggaaatcatttgctttttataccgttattggttgtgctgttacacgaacgaccctgtagaggctttaaatcaaacacagacacttaatttacagttcactgagcctttacccttaaaagaggttgaaagggctacacggagcgcagaaaaggcgtgggaagcacgaaataacgaagaggctaaccggattgcaatcgaaaaaggatatcccagtgctggatacaatattagcaataaaaagttgattgaatggctagatatcacaccagaagaacagaagcatttacagacgattatagacgctaatgagaaacggagaagaaagcgggaaagggataggatttatcaagaacaaaaacgtcgtgagcggggagatatgacccgacaggagtatattaagcaacaacaggataaaacagatgataaattatttaaattgcaggagttattagaacagaatcccaaaatctcaaaaattaaattagcaaaaatacttggtgtagataaatcgcacttatacagactgctgaaacaactataactggaaaaaattagtgtctcatggttcgtcgcccttatattatgggcgttagcctgcttgctaattggataggtgttattgtcatttcaacgtcggacgttttggtagatgaacgtcggacgttatttgcttcaatagattgttgatgtattaagggttgcagtgaatcgacaagcaaaaagttatgacgttgtgaaaaaattgaatagaaaattggaaattacgtcggacgttctaacttaaaaaccctgttatatcaatgatttaaaaggaaattaacgtcataaaagacctttctgcaacaaaagtttttctggaagagttgaggttattttataggtattatggacttttgtagactttttgtgtactttttgtggactccacactcgctggtatcgtgttattttttaattgagatatgaatatggaaattaaacgttttaggcgttggtttggtgatgacaaaaaaataagagtacccgctcacaacggatactctttcgagaaatgtacgaaacgctataaataaaaaataactagatacatttacattgtatcacgtttcgtacatttctccaataacaaattgattggaggaatgcaaagtgaataatgaaccagtaaaacgtggtaagaagaacagatgggaattaaacctacctataatgacttatgtagtagctgatgattggattgataaactaggacacgaaacgtttactttatggttgaggttccatacttgggtagatagagaagatgaactccgagattatgatcgcatacctagaagttttgagaacatatataaaaagacactaggaatctcaaaaagtaagttttatagattgataaaacctttatgggaatatggattaatagacatcatagaatacgaagaatctaaccgtaattctactaaacctaaaaatataattgtttatgagtatcctttacacgaaatagaaagaaagtataaaccactagaaaaattaagagattgggataaagactataattccgtttctaaagaattaggtaaaacaggtggtagaccaaggaaaaaagatagtgaagaagaacccgaaaagaaacccgaagaagtaactaaaaagaaacgtaaatataagttaaaaagagttatccacaacggtttcaaaaatgaaacggtggagggtttcaaaaatgaaacggtggagggtttcaaaaatgaaacggtgaccgtttcaaaaataaaacccaataattattcaaatatctttaataacttatcaaatatttctactaatgtttcaaataatttattaattgatgatgatgaggaaatcgaaaatgaaccaactggtcgtacaataaataggtcattacttttttcacaagaagatattaaacaggcctatcaatttattaatagattttcagttatacagttacgtgaaaactttagctttgataaacactttgaagaacggttggtatgttatttatggaaagcagggatttctactttttacacgcacgaaatcagtaaaatgataaaaaaaatagcagactatgaaaaatctaaaaaaggtagattaaacccaatacgtgaccgagccttatatatggtaaatggtcttgtaatgaatagagcttcttcccaaagtgaacatgctacttataaactaaaccaatataaaaaacagaaggaacaggaaaaacaacaacaggagcaacaaagatcaagagtaccgttctataattggttggaggaaagagaagaacaaaccgaaggtcaactacccaccacttaaagcctaacggcttttgaagtggggcttgtaaaaagccctagttgactaccccaagtctttcgaggactacgttggaaaggtcatgacacctacaaatgctcctctagttcgtagccactgtcgttgatggttaaaagtcctgatgggtagggacggtgctgtcaacatcacaagcccttccaacatgggggaagaggaagaacactccgagaaaggagggggctgtcgtacacgccttgttcgtgtacgtgatttttaacacttttatctctaatataatctctccttgagttagcagagactaagaataaaacacattaggattttttatctacataaggaggttcaatacatgcctactatttcgtttaagggaaagtcttttgtacaaaatcatcacttgactgtaaaatatcatgaattgatcccagaaccagaaaaaagtctgaccgataaagttagtcttcatgacaatcttatcattcatggggacaatttaaaggcgttgaaagctctactacctacatatgctggtaagatagattgcatctatattgacccaccatacaatactggaactgaaaaatggatttataatgataatgtcaactccccaatgattagggaatggcttggaaaagtggtagacaaagaagacttatcccgacatgataagtggctttgtatgatgatgccgaggttaaaactgttgaaagagttgttgtcagaagacggagtgatatttgtaagcattgactacaatgaaatacaccatcttacgtgccttatgaacgaaatattcggtgaggagaattttcgtgacgctattatcattcgtagaggagtaaaaaatgttcaagcgcaatttgacacaattgattctctttcaaatggttatgagtctattttggtttacactaaacagccatctcgacgatttaataaggtttatgaagatgtagaagaaaagcctggtagttggaataatcattggagaggtacagaccgtaaaactatgagatatgaattatttggggttactccgacagaaggtcaatggagatgggggaaagaacgtagtctccaggctattgaaaactatcaaatgatgttagatgaacttagacaaaaaggcattactaatccaactcaagaggatattgataaatggtatcttgaatatgtagaaaataatggggaagatattgacttgttacgacaaaatgataatggcacgattgagcactttgttccaccgactagcaaaaagttgttaagtaatgcctggtttgacttaaaacccaacggttctagtcaattaaagaagatatttggaaggaaggttttcgataaccctaaatcaattgatttggtaaaaagactaatacaatttgcgactgaaaacaaagaagcgattgtacttgactcatttgcagggagtggcactactgctcatgcagtattatcgcttaacaaacaagatggagggaatcgtcgtttcatccttattgagatggaagaatatgcacatgagattaccgcagaacgcggatctttatcgatttgcatgcaagctaattcggtggaaacgaggtcatcatttccttccgaaaaaacggttgcatttaaatcttacatatgtaatactttcaaagactacatttgtaagatttgatgtttgagtcggctgaaagatcgtacgtaccaattattgtttcgtgattgttcaagccataacactgtagggatagtggaaagagtgcttcatctggttacgatcaatcaaatattcaaacggagggagacgattttgatgaaaccagtaacgttatacgatgtcgcagagtatgccggtgtctcttatcagaccgtttcccgcgtggtgaaccaggccagccacgtttctgcgaaaacgcgggaaaaagtggaagcggcgatggcggagctgaattacattcccaaccgcgtggcacaacaactggcgggcaaacagtcgttgctgattggcgttgccacctccagtctggccctgcacgcgccgtcgcaaattgtcgcggcgattaaatctcgcgccgatcaactgggtgccagcgtggtggtgtcgatggtagaacgaagcggcgtcgaagcctgtaaaacggcggtgcacaatcttctcgcgcaacgcgtcagtgggctgatcattaactatccgctggatgaccaggatgccattgctgtggaagctgcctgcactaatgttccggcgttatttcttgatgtctctgaccagacacccatcaacagtattattttctcccatgaagacggtacgcgactgggcgtggagcatctggtcgcattgggtcaccagcaaatcgcgctgttagcgggcccattaagttctgtctcggcgcgtctgcgtctggctggctggcataaatatctcactcgcaatcaaattcagccgatagcggaacgggaaggcgactggagtgccatgtccggttttcaacaaaccatgcaaatgctgaatgagggcatcgttcccactgcgatgctggttgccaacgatcagatggcgctgggcgcaatgcgcgccattaccgagtccgggctgcgcgttggtgcggatatctcggtagtgggatacgacgataccgaagacagctcatgttatatcccgccgttaaccaccatcaaacaggattttcgcctgctggggcaaaccagcgtggaccgcttgctgcaactctctcagggccaggcggtgaagggcaatcagctgttgcccgtctcactggtgaaaagaaaaaccaccctggcgcccaatacgcaaaccgcctctccccgcgcgttggccgattcattaatgcagctggcacgacaggtttcccgactggaaagcgggcagtgagcgcaacgcaattaatgtgagttaggatcgctaccttaagagagacgcgttatcgggggttagttcgtcatcattgatgagggttgattatcacagtttattactctgaattggctatccgcgtgtgtacctctacctggagtttttcccacggtggatatttcttcttgcgctgagcgtaagagctatctgacagaacagttcttctttgcttcctcgccagttcgctcgctatgctcggttacacggctgcggcgagcgctagtgataataagtgactgaggtatgtgctcttcttatctccttttgtagtgttgctcttattttaaacaactttgcggttttttgatgactttgcgattttgttgttgctttgcagtaaattgcaagatttaataaaaaaacgcaaagcaatgattaaaggatgttcagaatgaaactcatggaaacacttaaccagtgcataaacgctggtcatgaaatgacgaaggctatcgccattgcacagtttaatgatgacagcccggaagcgaggaaaataacccggcgctggagaataggtgaagcagcggatttagttggggtttcttctcaggctatcagagatgccgagaaagcagggcgactaccgcacccggatatggaaattcgaggacgggttgagcaacgtgttggttatacaattgaacaaattaatcatatgcgtgatgtgtttggtacgcgattgcgacgtgctgaagacgtatttccaccggtgatcggggttgctgcccataaaggtggcgtttacaaaacctcagtttctgttcatcttgctcaggatctggctctgaaggggctacgtgttttgctcgtggaaggtaacgacccccagggaacagcctcaatgtatcacggatgggtaccagatcttcatattcatgcagaagacactctcctgcctttctatcttggggaaaaggacgatgtcacttatgcaataaagcccacttgctggccggggcttgacattattccttcctgtctggctctgcaccgtattgaaactgagttaatgggcaaatttgatgaaggtaaactgcccaccgatccacacctgatgctccgactggccattgaaactgttgctcatgactatgatgtcatagttattgacagcgcgcctaacctgggtatcggcacgattaatgtcgtatgtgctgctgatgtgctgattgttcccacgcctgctgagttgtttgactacacctccgcactgcagtttttcgatatgcttcgtgatctgctcaagaacgttgatcttaaagggttcgagcctgatgtacgtattttgcttaccaaatacagcaatagtaatggctctcagtccccgtggatggaggagcaaattcgggatgcctggggaagcatggttctaaaaaatgttgtacgtgaaacggatgaagttggtaaaggtcagatccggatgagaactgtttttgaacaggccattgatcaacgctcttcaactggtgcctggagaaatgctctttctatttgggaacctgtctgcaatgaaattttcgatcgtctgattaaaccacgctgggagattagataatgaagcgtgcgcctgttattccaaaacatacgctcaatactcaaccggttgaagatacttcgttatcgacaccagctgccccgatggtggattcgttaattgcgcgcgtaggagtaatggctcgcggtaatgccattactttgcctgtatgtggtcgggatgtgaagtttactcttgaagtgctccggggtgatagtgttgagaagacctctcgggtatggtcaggtaatgaacgtgaccaggagctgcttactgaggacgcactggatgatctcatcccttcttttctactgactggtcaacagacaccggcgttcggtcgaagagtatctggtgtcatagaaattgccgatgggagtcgccgtcgtaaagctgctgcacttaccgaaagtgattatcgtgttctggttggcgagctggatgatgagcagatggctgcattatccagattgggtaacgattatcgcccaacaagtgcttatgaacgtggtcagcgttatgcaagccgattgcagaatgaatttgctggaaatatttctgcgctggctgatgcggaaaatatttcacgtaagattattacccgctgtatcaacaccgccaaattgcctaaatcagttgttgctcttttttctcaccccggtgaactatctgcccggtcaggtgatgcacttcaaaaagcctttacagataaagaggaattacttaagcagcaggcatctaaccttcatgagcagaaaaaagctggggtgatatttgaagctgaagaagttatcactcttttaacttctgtgcttaaaacgtcatctgcatcaagaactagtttaagctcacgacatcagtttgctcctggagcgacagtattgtataagggcgataaaatggtgcttaacctggacaggtctcgtgttccaactgagtgtatagagaaaattgaggccattcttaaggaacttgaaaagccagcaccctgatgcgaccacgttttagtctacgtttatctgtctttacttaatgtcctttgttacaggccagaaagcataactggcctgaatattctctctgggcccactgttccacttgtatcgtcggtctgataatcagactgggaccacggtcccactcgtatcgtcggtctgattattagtctgggaccacggtcccactcgtatcgtcggtctgattattagtctgggaccacggtcccactcgtatcgtcggtctgataatcagactgggaccacggtcccactcgtatcgtcggtctgattattagtctgggaccatggtcccactcgtatcgtcggtctgattattagtctgggaccacggtcccactcgtatcgtcggtctgattattagtctggaaccacggtcccactcgtatcgtcggtctgattattagtctgggaccacggtcccactcgtatcgtcggtctgattattagtctgggaccacgatcccactcgtgttgtcggtctgattatcggtctgggaccacggtcccacttgtattgtcgatcagactatcagcgtgagactacgattccatcaatgcctgtcaagggcaagtattgacatgtcgtcgtaacctgtagaacggagtaacctcggtgtgcggttgtatgcctgctgtggattgctgctgtgtcctgcttatccacaacattttgcgcacggttatgtggacaaaatacctggttacccaggccgtgccggcacgttaaccgggctgcatccgatgcaagtgtgtcgctgtcgacgagctcgcgagctcggacatgaggttgccccgtattcagtgtcgctgatttgtattgtctgaagttgtttttacgttaagttgatgcagatcaattaatacgatacctgcgtcataattgattatttgacgtggtttgatggcctccacgcacgttgtgatatgtagatgataatcattatcactttacgggtcctttccggtgatccgacaggttacggggcggcgacctcgcgggttttcgctatttatgaaaattttccggtttaaggcgtttccgttcttcttcgtcataacttaatgtttttatttaaaataccctctgaaaagaaaggaaacgacaggtgctgaaagcgagctttttggcctctgtcgtttcctttctctgtttttgtccgtggaatgaacaatggaagtccgagctcatcgctaataacttcgtatagcatacattatacgaagttatattcgat

SEQ ID NO: 161 - DNA, 30250 bp, synthetic construct
  misc_feature 1..30250: note = seed plasmid 2
  source 1..30250: mol_type = other DNA
gcggccgcttgcccactccctctctgcgcgctcgctcgctcggtggggcctgcggaccaaaggtccgcagacggcagagctctgctctgccggccccaccgagcgagcgagcgcgcagagagggagtgggcaactccatcactaggggtaaggccttgatggccaattcgattcgattagggcctacttggcctaatagtaatcaattacggggtcattagttcatagcccatatatggagttccgcgttacataacttacggtaaatggcccgcctggctgaccgcccaacgacccccgcccattgacgtcaataatgacgtatgttcccatagtaacgccaatagggactttccattgacgtcaatgggtggagtatttacggtaaactgcccacttggcagtacatcaagtgtatcatatgccaagtacgccccctattgacgtcaatgacggtaaatggcccgcctggcattatgcccagtacatgaccttatgggactttcctacttggcagtacatctacgtattagtcatcgctattaccatggtgatgcggttttggcagtacatcaatgggcgtggatagcggtttgactcacggggatttccaagtctccaccccattgacgtcaatgggagtttgttttggcaccaaaatcaacgggactttccaaaatgtcgtaacaactccgccccattgacgcaaatgggcggtaggcgtgtacggtgggaggtctatataagcagagctggtttagtgaaccgtcagatgccaccatggtgagcaagggcgaggagctgttcaccggggtggtgcccatcctggtcgagctggacggcgacgtaaacggccacaagttcagcgtgtccggcgagggcgagggcgatgccacctacggcaagctgaccctgaagttcatctgcaccaccggcaagctgcccgtgccctggcccaccctcgtgaccaccctgacctacggcgtgcagtgcttcagccgctaccccgaccacatgaagcagcacgacttcttcaagtccgccatgcccgaaggctacgtccaggagcgcaccatcttcttcaaggacgacggcaactacaagacccgcgccgaggtgaagttcgagggcgacaccctggtgaaccgcatcgagctgaagggcatcgacttcaaggaggacggcaacatcctggggcacaagctggagtacaactacaacagccacaacgtctatatcatggccgacaagcagaagaacggcatcaaggtgaacttcaagatccgccacaacatcgaggacggcagcgtgcagctcgccgaccactaccagcagaacacccccatcggcgacggccccgtgctgctgcccgacaaccactacctgagcacccagtccgccctgagcaaagaccccaacgagaagcgcgatcacatggtcctgctggagttcgtgaccgccgccgggatcactctcggcatggacgagctgtacaagtaagggtggcatccctgtgacccctccccagtgcctctcctggccctggaagttgccactccagtgcccaccagccttgtcctaataaaattaagttgcatcattttgtctgactaggtgtccttctataatattatggggtggaggggggtggtatggagcaaggggcaagttgggaagacaacctgtagggcctgcggggtctattgggaaccaagctggagtgcagtggcacaatcttggctcactgcaatctccgcctcctgggttcaagcgattctcctgcctcagcctcccgagttgttgggattccaggcatgcatgaccaggctcagctaatttttgtttttttggtagagacggggtttcaccatattggccaggctggtctccaactcctaatctcaggtgatctacccaccttggcctcccaaattgctgggattacaggcgtgaaccactgctcccttccctgtccttttacccctagtgatggagttgcccactccctctctgcgcgctcgctcgctcggtggggcctgcggaccaaaggtccgcagacggcagagctctgctctgccggccccaccgagcgagcgagcgcgcagagagggagtgggcaaggcctgattggccatatatgtatctggacatccatgtgatgccggcagcggtagttgttgctcgcataaattcgcgggctcggttccaaatattgcgcaggggtaaaaagcgttcaatagttgccacgctttgaccggtcaggcgtgcgcagtcttgaatgctctggacatggaaaaaatgaaagttggtaagcgactcccttccgtggtttggtggaaaagtcacaagggtaccatagcgaggaaccccggttcgaaaccggcaggatccgctatgagcacaagtgaggcgcttgcgcgttgaacccggccaaggacccccagacacggagaggagtctttttttatttattttttcttagatgcatcctgtcctgcgacaaatgcgacctcagcccagggcaaccacggcctcagcagcggtggcgctttcgggctctggcgaacaggaagagcctcaatggggtgcctaattgtatgctacaaagtcctcaggtagtgggcacattgcaacgcaatcagaatgaattgtataaattcttaaacaatctgtccccttactttcgtcacaaccgcgagcgcatagaaaaagctacatcttttactaaaatgcaaaatggactcaaataaacgtgtacacaatgcattaataataaaaccattttattagctcattggagtacaagcttgactgttttattaaaaatcaaatggctcttcgcgacagtcgccgtggttggtgggcagggatatgtttctgtactgcaaacgctgatgccacttgaattctggaataacaagcctagggggggagccgtcaaaattttctccccacagctggcgcacaagttgcagggcgcccataacatcaggagcagaaatcttgaagtcgcaattagggccagcattgccgcgcgcattgcgataaactggatttgcgcactgaaaaaccaacaaacacggatacttaatactggctaacgctccagggtcggttacttcgttgatatcaatgttatccacattgctgaggttaaaaggagtgattttacacagttgacgccccatccgtggcaggccatcttgcttgtttaaacattcgcagcgcactggcataaggagacgtttttgcccatgtcgcatgtgagggtagtcggccagcataaaagcttcaatttgcctaaaagctatttgagccttcattccttcagaataaaacaagccgcaggactttccggagaaagaattattcccgcagccaacatcatgaaaacagcagcgggcatcgtcgtttttaatttgaactacattacgcccccagcggttttgcgccaccttggctttcgaggggttctctttcaacgctcgttgcccactttcgctggttacatccatttccaccaaatgctctttgcgcaccatctccattccatgcaggcatctaagctccccttcgcgctcggtacacttatgctcccacacgcagcaaccggtgggttcccaggaattctgttggacaccggcataagcttgcatatatccttgcaaaaagcgtcccatgagctcctgaaaggttttttgggatgaaaaagtcagctgcaaaccgcgcttttcttcgttgagccatgttgtgcatattttcttgtacacgctgccctgatccggcaaaaaacgaaaggtggcgcgctcgtcgtgatccacatggtacttttccattagcatagccatggcttccatgcctttttcccaagctgaaactaggggctggcttgccggattgcgaacaacaacaacattcttttcattttcgtcgctgttttgagcggaagccttcaaaacgtgtacctgcctggtttccattttttgaaaagactgagaaccgtctgcatgatgcataatgcggacgggcggcatgctgaaacccattactcctaaaactgctcttggtggttctgcctcttcttcttctgcactctctggggaaagaggtatcgcagccatagatttcttgacttttttctttggaggtaaaggcacagcttccagttcttcttcgctttcggaatccagaaagtatctgcccatttttggcggcggcggctgagcgctgcggtctggggtgcgctccctctgtgagtgctgattgctggccattatttaatcctaggcaaagaaacacatgatggatctggagccacaggaaagcttaaccgcccccaccgctcccgccattggcgctacggctgtcatggagaaggacaaaagtctactcataccccaagacgcaccggttgagcagaacttgggctacgagactccccccgaggaatttgaaggctttcttcaaatccaaaagcaaccaaatgagcaaaacgctgggctcgaggaccatgactacctaaacgagggagatgtcctgtttaaacatctacagcgacaaagcactatcgttcgcgacgccatatctgatcgctcttcaataccagtttcaattgcagaactatcttgcatctacgaacgcaacctgttctccccacgtgtgccccctaaacggcaagccaacggcacatgcgagccaaatcctcgccttaacttctacccagtttttgcagtgccagaagcactggcaacataccatattttctttaaaaatcacaaaatacccctatcctgtcgagctaaccgcagccgcgcagatgagcttcttgctttaagggctggcgcttccatacctgggattgtgtccttggaagaggtgcctaaaatttttgaaggtttaggtcgggatgaaaaacgagcagcaaatgccctgcaaaaagaaaatgaacaaaatcaccatgggaatagtgctctaatagaactggaaggtgacaatgcccgcctggcagttttaaagcgcaatattgaggttactcactttgcctacccggcagtaaatcttccgccaaaggtaatgagcgcagtgatgaatcagctactaattaagcgagcccaacccattgacaaagatgcaaacttgcaagacccggaggcaacagatgatggaaagccggttgtaagcgacgagcaattaactaagtggttgggaacagacaattccaacgaactacaacagcggcgtaaactcatgatggccgccgtacttgtaactgtggaactcgagtgcatgcatcgttttttctccgacatcaccacattgcgcaaaattgaggaatgtcttcactacactttccgccatggctacgtgcgccaagcctgtaaaatttctaatgtggagctgagcaatctagtttcttacatgggcatcttgcatgaaaaccgattgggacagaacgtgctacactcaacactacgcgatgaagcacgcagagattacgtgcgagactgcatttaccttttcctgttacatacctggcaaactgggatgggtgtttggcagcaatgcttggaagaaaaaaaccttcgagaactaaacaaactgttagacagagcactaaaatccctatggaccggttttgacgaacggacagtagctgcagagctagctgacataattttcccagaaaggttaatgataaccttgcaaaacggcttgcctgactttatgagtcaaagtatgctgcacaattatcgctcttttatattagagcgttctgggatgcttcctagcatgtgttgtgcacttccttcagattttgtgcctatatattttagagagtgcccccctcccctgtggagccactgctacttactacgacttgctaactacctagcttaccactcagaccttatgacagattcaagcggcgaaggcctaatggagtgtcactgccgctgcaatctttgcaccccccaccgttctttggtttgcaatactgaactattaagtgaaagtcaagtcattggtaccttcgaaatgcagggaccgcagtctgacagcaatttcacgacgaacctaagacttacccctgggctttggacttctgcctacctgcgcaaatttgaaccccaagattaccacgcccacagtatcaatttttacgaagaccaatccaaacccccaaaagcgccactaacggcttgcgtcattacgcagggaaaaattctagcccaattgcatgctattaagcaagcgcgcgaagagtttttacttaaaaaaggacacggagtgtaccttgatccccaaaccggcgaggaactaaaccttccatcacctttgtgtgctactgcgtctccccattcgcagcatgtccccgaaagccgcaaaacaggctattgcgcagcaacgctcaaagaaacagcagcaacggcaggaaatctgggaggaagaatcttgggagagtcaggcagaggacgaggtcgaggacttggaagaatgggaggaggaggaggcggacagcctagacgaggatccagaggaggaggaggaaggttccaaggacggagcgaccgccgccaaaccgtcgctttcaaccaagccctctccaatgaaacccgctgtgagcaaatctcagaaagccaaccgtagatgggacaccattgaaaccagcgccgcaaacttgggtaagaatcgcaagcaggcgcgtcggggctactgctcatggcgggctcaccaaagtaatattgtagcctgctttcagcactgcggggggaatatctcatttgcaaggcggtatttgctataccatgatggagtggcgattccaaggaatgtcctccattactaccgtcatctctacagcccctttgaagagctcgacaaggaaccgacctgcaacagccaagcggcccactagaatcggcaacagcagcaacaaggaaagtcctgaggcgcgcgagttaagaaaacgcatttttcccactttatatgctatttttcagcagagtcgaggtcaagaacacgaactgaaaataaaaaaccgttccctgcgttcacttacccgcagctgtctctacctcaaaagcgaagatcagttgcaacgcaccttgcaggacgcagaagctctgttcaataaatactgctccctctcgcttaaagagtaaaaaaagcccgcgcgcggactttcaacaggcgggaaaagtgacgtcacaacaagatgagtaaagatattcccacgccttacatgtggagctttcaaccccaaatgggactggcggccggcgcggctcaagactattctagcaaaatgaattggttaagcgccggaccccacatgatttccagggtgaatggggtacgagcccggcgtaaccaaatactgctagaacaagccgctctcaccgctacaccacgtaatcaacttaaccctccctcttggccagctgccctgatatatcaggaaaatccccctcctaccactgtacttttgcctcgcgacgcccaggccgaagtccatatgactaacgctggggcacagcttgcgggcggtgcacgtcacagtttcaggtataaaggtcgcactgagccctatccgtctaatgaaagttgcatttaatggcattacgtcgctaaatggatactctttaacattcatgtggtcaggtctatcaaactatataaatcagcctttctctacaccatcctgctccttttcttacattacccaagaataaaaacacacacaaaacacaaattgcgtacttattgtttatttttttttttttttacactatacgcgtggttaaactgcctccttcccattttaccttgtatacctccctttccccctttgtagctgaaaacaactgcacttgaatatttcgacttaggttttttggcgttagcgtccacacagtttctttacgggcaaagcgagggtcggtgatggaaacgaatccctcgcccgcacagtcactcaagcggcattccccatccaaaaccaggtccatgattttatcctacaaaaagtaacaacagtcagtgtccatcagccgcccaaggattctctcgttgattataatctccaaataaaattgctcgatgatgcataattaaaccctttagcagttgctgacgataacgttcatgccgactatgttttagagggcgaacagtgttttcagcaattacttgaacaacttttaacattagcagtctggtacgacgagcgcaacagcgcatgcgtatctcacttaagtctttacaataatcacaacacagcactaacatgttatttaaaattccataattaaaggcgctccatccaaaactaactttttctaacgctaaccaggcatggccatcatacataattttaaagtaaattaaatggcgacctctaacaaaggtgcttcccacatacatcacctctttaggcattaaatggttaacaacctcccgataccaaaaacaccttttgttaattaaggcgccatatacggccattttgaaccagcgtcccaaaagcatcccagctgacatacactgtagtgaacccggacgctggcaatgacaatgaataagccaccgctcatgaccatgtaataattgagtaacttcaacatttatagtggcacaacacatacatacactcatgtattttttcaaaataaacatctcataatcagttagaatcatatcccacggtattggccattcctgcagcactgtaaaacctacacatgaaggaatgcctcttacctcacttacattatgtaaagtcagactattacactcaggccataaagaattttccgaagtactcaacgtagcttttgactgttcctcacagggcggtagttggtacttgttgtatggtgccaatctgtagcgataccgtctgtcgcgctgcatcgtaaacaacagacttgcgagcgtcttcgtacttaaaaaaacaaaaccacgtacgaccactggttatcgcacctcgtcctttttgtttgcagcgttggcgttccgtcaaaaaagcaaagtacaaccactctcgcaggcttgctaaaatgtattcagcttcaggtgttatcttcaaatcatgatgtttaataaagcgcagagtatccacacaggatgcatgggctaaaccaagccatgctatgcaggcagccgtgtcccgacttacaggaggaggaggaatacaaggtagaggcataaaaacttaatcaagacggtcagcaaggatttgaatgcgtaaatctcgcaggtggcagcgatcgcctccgctgtgctggtgaaagatcacagccagatcaaattgtaagcgattttccaaatgttcaacaacagcttctaaaagagccacagctctgatttcgataaacaaaagcaaagcaaatgcattatcatgaaactcttctatcatcaaactgcctgactgaaccattcccaggtaattttcattcttccactgttgtattatttgaacacactgattttgcaggtttaaaccgtgaatattaaaaagctctgtaagggcgccctccaccgccatccgcaggcagtacttcatatttgctgaaaaaagtctggatcttcaaacacctgcagtaaattcagtagatttacattaggctccacaccttggtctcgcagctgacatcttaatgccagttgtataaaatcatacaaatcagaagccagcagcaaagaaagttcacctccaggtacaagttccggagttcccacagaacatacaacttgcacaaatggacccatattagtaagcgtggcgccaacgtagacatcgcgcataggaggagttaaataatgcattaccagcagccaaaactcaggtagcacgtctttaagaaacgtcaccacctcaaaatctaagccatgcaaatagttccgtaaagactccggaaacaacacggagtaatgaacaagcgacctctgaaacatgctttaggttagcctgaaaaataaaaatatgttaaattaaagatgcctggcaaacgggtggaaaaacaactctacttaaaagcaagcgcgcgactggctgctttgcgcgaacatcgcaaaacacgtcggaatgattaaacaacaaaacactgagctccattcttgagcctggataaagcgtttcagcgccaacaaaaacccctctggcgttcatgtcgcataatgaaaacaatgttcccaaatatccaggaggaatatcaactgctatgtgcaaatataaaagcacaactccatgtggaggtataacaaaattcgcaggagaaaataacacataagcattagagtcgccctcttgtttaggcaacatagccccaggtcccgtaaaatacacataaagagtctcaaaagcagccataatgccttaccagaaaaacagtacaaagccaggcacagcagacacaatctgccgcaagtgcgcacctttaatactgaaaaatagtgacgtaaatggccaaagttcgcctacacaacacaaaaaaaaccccaaaagcccgcgaaaaaaatcacttccgcatatgactcggcataatacggtgttctcacgacggcctatgtggcctcgcgaagcgcctcccacgctgccgcgtcagcgctgacgtaaattacgtcataggggagtggtcctgtattagctgtcacgtgagtgcttttgcgacattttgcgacaccacgtggccatttagggtatatatggccgagtgagcgagcaggatctccattttgaccgcgaaatttgaacgagcagcagccatgccgggcttctacgagatcgtgatcaaggtgccgagcgacctggacgagcacctgccgggcatttctgactcgtttgtgagctgggtggccgagaaggaatgggagctgcccccggattctgacatggatctgaatctgattgagcaggcacccctgaccgtggccgagaagctgcagcgcgacttcctggtccaatggcgccgcgtgagtaaggctccggaggccctcttctttgttcagttcgagaagggcgagtcctacttccacctccatattctggtggagaccacgggggtcaaatccatggtgctgggccgcttcctgagtcagattagggacaagctggtgcagaccatctaccgcgggatcgagccgaccctgcccaactggttcgcggtgaccaagacgcgtaatggcgccggaggggggaacaaggtggtggacgagtgctacatccccaactacctcctgcccaagactcagcccgagctgcagtgggcgtggactaacatggaggagtatataagcgcctgtttgaacctggccgagcgcaaacggctcgtggcgcagcacctgacccacgtcagccagacccaggagcagaacaaggagaatctgaaccccaattctgacgcgcctgtcatccggtcaaaaacctccgcgcgctacatggagctggtcgggtggctggtggaccggggcatcacctccgagaagcagtggatccaggaggaccaggcctcgtacatctccttcaacgccgcttccaactcgcggtcccagatcaaggccgctctggacaatgccggcaagatcatggcgctgaccaaatccgcgcccgactacctggtaggccccgctccgcccgcggacattaaaaccaaccgcatctaccgcatcctggagctgaacggctacgaacctgcctacgccggctccgtctttctcggctgggcccagaaaaggttcgggaagcgcaacaccatctggctgtttgggccggccaccacgggcaagaccaacatcgcggaagccatcgcccacgccgtgcccttctacggctgcgtcaactggaccaatgagaactttcccttcaatgattgcgtcgacaagatggtgatctggtgggaggagggcaagatgacggccaaggtcgtggagtccgccaaggccattctcggcggcagcaaggtgcgcgtggaccaaaagtgcaagtcgtccgcccagatcgaccccacccccgtgatcgtcacctccaacaccaacatgtgcgccgtgattgacgggaacagcaccaccttcgagcaccagcagccgttgcaggaccggatgttcaaatttgaactcacccgccgtctggagcatgactttggcaaggtgacaaagcaggaagtcaaagagttcttccgctgggcgcaggatcacgtgaccgaggtggcgcatgagttctacgtcagaaagggtggagccaacaaaagacccgcccccgatgacgcggataaaagcgagcccaagcgggcctgcccctcagtcgcggatccatcgacgtcagacgcggaaggagctccggtggactttgccgacaggtaccaaaacaaatgttctcgtcacgcgggcatgcttcagatgctgtttccctgcaagacatgcgagagaatgaatcagaatttcaacatttgcttcacgcacgggacgagagactgttcagagtgcttccccggcgtgtcagaatctcaaccggtcgtcagaaagaggacgtatcggaaactctgtgccattcatcatctgctggggcgggctcccgagattgcttgctcggcctgcgatctggtcaacgtggacctggatgactgtgtttctgagcaataaatgacttaaaccaggtggcctctatggccatggctgccgatggttatcttccagattggctcgaggacactctctctgaaggaataagacagtggtggaagctcaaacctggcccaccaccaccaaagcccgcagagcggcataaggacgacagcaggggtcttgtgcttcctgggtacaagtacctcggacccttcaacggactcgacaagggagagccggtcaacgaggcagacgccgcggccctcgagcacgacaaagcctacgaccggcagctcgacagcggagacaacccgtacctcaagtacaaccacgccgacgcggagtttcaggagcgccttaaagaagatacgtcttttgggggcaacctcggacgagcagtcttccaggcgaaaaagagggttcttgaacctctgggcctggttgaggaacctgttaagacggctccgggaaaaaagaggccggtagagcactctcctgtggagccagactcctcctcgggaaccggaaaggcgggccagcagcctgcaagaaaaagattgaattttggtcagactggagacgcagactcagtacctgacccccagcctctcggacagccaccagcagccccctctggtctgggaactaatacgatggctacaggcagtggcgcaccaatggcagacaataacgagggcgccgacggagtgggtaattcctcgggaaattggcattgcgattccacatggatgggcgacagagtcatcaccaccagcacccgaacctgggccctgcccacctacaacaaccacctctacaaacaaatttccagccaatcaggagcctcgaacgacaatcactactttggctacagcaccccttgggggtattttgacttcaacagattccactgccacttttcaccacgtgactggcaaagactcatcaacaacaactggggattccgacccaagagactcaacttcaagctctttaacattcaagtcaaagaggtcacgcagaatgacggtacgacgacgattgccaataaccttaccagcacggttcaggtgtttactgactcggagtaccagctcccgtacgtcctcggctcggcgcatcaaggatgcctcccgccgttcccagcagacgtcttcatggtgccacagtatggatacctcaccctgaacaacgggagtcaggcagtaggacgctcttcattttactgcctggagtactttccttctcagatgctgcgtaccggaaacaactttaccttcagctacacttttgaggacgttcctttccacagcagctacgctcacagccagagtctggaccgtctcatgaatcctctcatcgaccagtacctgtattacttgagcagaacaaacactccaagtggaaccaccacgcagtcaaggcttcagttttctcaggccggagcgagtgacattcgggaccagtctaggaactggcttcctggaccctgttaccgccagcagcgagtatcaaagacatctgcggataacaacaacagtgaatactcgtggactggagctaccaagtaccacctcaatggcagagactctctggtgaatccgggcccggccatggcaagccacaaggacgatgaagaaaagttttttcctcagagcggggttctcatctttgggaagcaaggctcagagaaaacaaatgtggacattgaaaaggtcatgattacagacgaagaggaaatcaggacaaccaatcccgtggctacggagcagtatggttctgtatctaccaacctccagagaggcaacagacaagcagctaccgcagatgtcaacacacaaggcgttcttccaggcatggtctggcaggacagagatgtgtaccttcaggggcccatctgggcaaagattccacacacggacggacattttcacccctctcccctcatgggtggattcggacttaaacaccctcctccacagattctcatcaagaacaccccggtacctgcgaatccttcgaccaccttcagtgcggcaaagtttgcttccttcatcacacagtactccacgggacaggtcagcgtggagatcgagtgggagctgcagaaggaaaacagcaaacgctggaatcccgaaattcagtacacttccaactacaacaagtctgttaatgtggactttactgtggacactaatggcgtgtattcagagcctcgccccattggcaccagatacctgactcgtaatctgttgcttgttaatcaataaaccgtttaattcgtttcagttgaactttggtctctgcgtatttctttcttatctagtttccatggctacgtagataagtagcatggcgggttaatcattaactacagcccgggcgtttaaacagcgggcggaggggtggagtcgtgacgtgaattacgtcatagggttagggaggtcctgtattagaggtcacgtgagtgttttgcgacattttgcgacaccatgtggtctcgctgggggggggggcccgagtgagcacgcagggtctccattttgaagcgggaggtttgaacgcggccgcaaaaggccttcttggccaccccgggccgtcgaccaattctcatgtttgacagcttatcatcgaatttctgccattcatccgcttattatcacttattcaggcgtagcaaccaggcgtttaagggcaccaataactgccttaaaaaaattacgccccgccctgccactcatcgcagtactgttgtaattcattaagcattctgccgacatggaagccatcacaaacggcatgatgaacctgaatcgccagcggcatcagcaccttgtcgccttgcgtataatatttgcccatggtgaaaacgggggcgaagaagttgtccatattggccacgtttaaatcaaaactggtgaaactcacccagggattggctgagacgaaaaacatattctcaataaaccctttagggaaataggccaggttttcaccgtaacacgccacatcttgcgaatatatgtgtagaaactgccggaaatcgtcgtggtattcactccagagcgatgaaaacgtttcagtttgctcatggaaaacggtgtaacaagggtgaacactatcccatatcaccagctcaccgtctttcattgccatacggaattccggatgagcattcatcaggcgggcaagaatgtgaataaaggccggataaaacttgtgcttatttttctttacggtctttaaaaaggccgtaatatccagctgaacggtctggttataggtacattgagcaactgactgaaatgcctcaaaatgttctttacgatgccattgggatatatcaacggtggtatatccagtgatttttttctccattttagcttccttagctcctgaaaatctcgataactcaaaaaatacgcccggtagtgatcttatttcattatggtgaaagttggaacctcttacgtgccgatcaacgtctcattttcgccaaaagttggcccagggcttcccggtatcaacagggacaccaggatttatttattctgcgaagtgatcttccgtcacaggtatttattcgcgataagctcatggagcggcgtaaccgtcgcacaggaaggacagagaaagcgcggatctgggaagtgacggacagaacggtcaggacctggattggggaggcggttgccgccgctgctgctgacggtgtgacgttctctgttccggtcacaccacatacgttccgccattcctatgcgatgcacatgctgtatgccggtataccgctgaaagttctgcaaagcctgatgggacataagtccatcagttcaacggaagtctacacgaaggtttttgcgctggatgtggctgcccggcaccgggtgcagtttgcgatgccggagtctgatgcggttgcgatgctgaaacaattatcctgagaataaatgccttggcctttatatggaaatgtggaactgagtggatatgctgtttttgtctgttaaacagagaagctggctgttatccactgagaagcgaacgaaacagtcgggaaaatctcccattatcgtagagatccgcattattaatctcaggagcctgtgtagcgtttataggaagtagtgttctgtcatgatgcctgcaagcggtaacgaaaacgatttgaatatgccttcaggaacaatagaaatcttcgtgcggtgttacgttgaagtggagcggattatgtcagcaatggacagaacaacctaatgaacacagaaccatgatgtggtctgtccttttacagccagtagtgctcgccgcagtcgagcgacagggcgaagccctcgagtgagcgaggaagcaccagggaacagcacttatatattctgcttacacacgatgcctgaaaaaacttcccttggggttatccacttatccacggggatatttttataattattttttttatagtttttagatcttcttttttagagcgccttgtaggcctttatccatgctggttctagagaaggtgttgtgacaaattgccctttcagtgtgacaaatcaccctcaaatgacagtcctgtctgtgacaaattgcccttaaccctgtgacaaattgccctcagaagaagctgttttttcacaaagttatccctgcttattgactcttttttatttagtgtgacaatctaaaaacttgtcacacttcacatggatctgtcatggcggaaacagcggttatcaatcacaagaaacgtaaaaatagcccgcgaatcgtccagtcaaacgacctcactgaggcggcatatagtctctcccgggatcaaaaacgtatgctgtatctgttcgttgaccagatcagaaaatctgatggcaccctacaggaacatgacggtatctgcgagatccatgttgctaaatatgctgaaatattcggattgacctctgcggaagccagtaaggatatacggcaggcattgaagagtttcgcggggaaggaagtggttttttatcgccctgaagaggatgccggcgatgaaaaaggctatgaatcttttccttggtttatcaaacgtgcgcacagtccatccagagggctttacagtgtacatatcaacccatatctcattcccttctttatcgggttacagaaccggtttacgcagtttcggcttagtgaaacaaaagaaatcaccaatccgtatgccatgcgtttatacgaatccctgtgtcagtatcgtaagccggatggctcaggcatcgtctctctgaaaatcgactggatcatagagcgttaccagctgcctcaaagttaccagcgtatgcctgacttccgccgccgcttcctgcaggtctgtgttaatgagatcaacagcagaactccaatgcgcctctcatacattgagaaaaagaaaggccgccagacgactcatatcgtattttccttccgcgatatcacttccatgacgacaggatagtctgagggttatctgtcacagatttgagggtggttcgtcacatttgttctgacctactgagggtaatttgtcacagttttgctgtttccttcagcctgcatggattttctcatactttttgaactgtaatttttaaggaagccaaatttgagggcagtttgtcacagttgatttccttctctttcccttcgtcatgtgacctgatacgcgtgctaccttaagagagtcaattcgcccttcccggtcgatatgaacagcttatttacataattcacgttattggtagttataaatgaaattcctaatatcggttatgaagtgaaattgaatttctacttgatctttctctctatttttgtaaaataaaattaagaatatttaaatattcaatgattcatttttgcagaaatcggaggaagaagaatatatgaaaacatttaacatttctcaacaagatccccccatattgttgtataagtgatgaaatactgaatttaaaacttagtttatatgtggtaaaatgttttaatcaagtttaggaggaattaattatgaagtgtaatgaataatgaatgtaacagggttcaattaaaagagggaagcgtatcattaaccctataaactacgtctgccctcattattggagggtgaaatgtgaatacatcctattcacaatcgaatttacgacacaaccaaattttaatttggctttgcattttatctttttttagcgtattaaatgaaatggttttgaacgtctcattacctgatattgcaaatgattttaataaaccaccagcgagtacaaactgggtgaacacagcctttatgttaaccttttccattggaacagctgtatatggaaagctatctgatcaattaggcatcaaaaggttactcctatttggaattataataaattgtttcgggtcggtaattgggtttgttggccattctttcttttccttacttattatggctcgttttattcaaggggctggtgcagctgcatttccagcactcgtaatggttgtagttgcgcgctatattccaaaggaaaataggggtaaagcatttggtcttattggatcgatagtagccatgggagaaggagtcggtccagcgattggtggaatgatagcccattatattcattggtcctatcttctactcattcctatgataacaattatcactgttccgtttcttatgaaattattaaagaaagaagtaaggataaaaggtcattttgatatcaaaggaattatactaatgtctgtaggcattgtattttttatgttgtttacaacatcatatagcatttcttttcttatcgttagcgtgctgtcattcctgatatttgtaaaacatatcaggaaagtaacagatccttttgttgatcccggattagggaaaaatataccttttatgattggagttctttgtgggggaattatatttggaacagtagcagggtttgtctctatggttccttatatgatgaaagatgttcaccagctaagtactgccgaaatcggaagtgtaattattttccctggaacaatgagtgtcattattttcggctacattggtgggatacttgttgatagaagaggtcctttatacgtgttaaacatcggagttacatttctttctgttagctttttaactgcttcctttcttttagaaacaacatcatggttcatgacaattataatcgtatttgttttaggtgggctttcgttcaccaaaacagttatatcaacaattgtttcaagtagcttgaaacagcaggaagctggtgctggaatgagtttgcttaactttaccagctttttatcagagggaacaggtattgcaattgtaggtggtttattatccatacccttacttgatcaaaggttgttacctatggaagttgatcagtcaacttatctgtatagtaatttgttattacttttttcaggaatcattgtcattagttggctggttaccttgaatgtatataaacattctcaaagggatttctaaatcgttaagggatcaactttgggagagagttcaaaattgatcctttttttataacaggaattgggcatcaaataaaacgaaaggctcagtcgaaagactgggcctttcgttttatctgttgtttgtcggtgaacgctctcctgagtaggacaaatccgccgggagcggatttgaacgttgcgaagcaacggcccggagggtggcgggcaggacgcccgccataaactgccaggcatcaaattaagcagaaggccatcctgacggatggcctttttgcgtttctacaaactcttcctgtcgtcatatctacaattctacacagcccagtccagactattcggcactgaaattatgggtgaagtggtcaagacctcactaggcaccttaaaaatagcgcaccctgaagaagatttatttgaggtagcccttgcctacctagcttccaagaaagatatcctaacagcacaagagcggaaagatgttttgttctacatccagaacaacctctgctaaaattcctgaaaaattttgcaaaaagttgttgactttatctacaaggtgtggcataatgtgtggaattgtgagcggataacaattaagctaattctatggtaaaagcattcctgaacccaatatccttatttttagtggacaaggccttgttctcatatggttgcttgagccagtgccttacaaggctcttccgctttggcaggctgttcaaaattatttattagagcaactcaaggaactaggcggagatccaaaagcaaccgatgcagcacgtgtttttcggattgctgggagcgtcaatagtaagaatggagcggaagtaagagcggaatatcggcacgattacagatatgagttaaggcagattcaatttgattaccttccagaactcaatgaggttattaatcccgctccacaaaagaaaaaacgggggcgtaaaaagaaagtagttcagttattcaatacctacaaactccattacgctcgcctattggatatagtgaaattggtggaactacgaaattatgaggtaactggatacagggaaatcatttgctttttataccgttattggttgtgctgttacacgaacgaccctgtagaggctttaaatcaaacacagacacttaatttacagttcactgagcctttacccttaaaagaggttgaaagggctacacggagcgcagaaaaggcgtgggaagcacgaaataacgaagaggctaaccggattgcaatcgaaaaaggatatcccagtgctggatacaatattagcaataaaaagttgattgaatggctagatatcacaccagaagaacagaagcatttacagacgattatagacgctaatgagaaacggagaagaaagcgggaaagggataggatttatcaagaacaaaaacgtcgtgagcggggagatatgacccgacaggagtatattaagcaacaacaggataaaacagatgataaattatttaaattgcaggagttattagaacagaatcccaaaatctcaaaaattaaattagcaaaaatacttggtgtagataaatcgcacttatacagactgctgaaacaactataactggaaaaaattagtgtctcatggttcgtcgcccttatattatgggcgttagcctgcttgctaattggataggtgttattgtcatttcaacgtcggacgttttggtagatgaacgtcggacgttatttgcttcaatagattgttgatgtattaagggttgcagtgaatcgacaagcaaaaagttatgacgttgtgaaaaaattgaatagaaaattggaaattacgtcggacgttctaacttaaaaaccctgttatatcaatgatttaaaaggaaattaacgtcataaaagacctttctgcaacaaaagtttttctggaagagttgaggttattttataggtattatggacttttgtagactttttgtgtactttttgtggactccacactcgctggtatcgtgttattttttaattgagatatgaatatggaaattaaacgttttaggcgttggtttggtgatgacaaaaaaataagagtacccgctcacaacggatactctttcgagaaatgtacgaaacgctataaataaaaaataactagatacatttacattgtatcacgtttcgtacatttctccaataacaaattgattggaggaatgcaaagtgaataatgaaccagtaaaacgtggtaagaagaacagatgggaattaaacctacctataatgacttatgtagtagctgatgattggattgataaactaggacacgaaacgtttactttatggttgaggttccatacttgggtagatagagaagatgaactccgagattatgatcgcatacctagaagttttgagaacatatataaaaagacactaggaatctcaaaaagtaagttttatagattgataaaacctttatgggaatatggattaatagacatcatagaatacgaagaatctaaccgtaattctactaaacctaaaaatataattgtttatgagtatcctttacacgaaatagaaagaaagtataaaccactagaaaaattaagagattgggataaagactataattccgtttctaaagaattaggtaaaacaggtggtagaccaaggaaaaaagatagtgaagaagaacccgaaaagaaacccgaagaagtaactaaaaagaaacgtaaatataagttaaaaagagttatccacaacggtttcaaaaatgaaacggtggagggtttcaaaaatgaaacggtggagggtttcaaaaatgaaacggtgaccgtttcaaaaataaaacccaataattattcaaatatctttaataacttatcaaatatttctactaatgtttcaaataatttattaattgatgatgatgaggaaatcgaaaatgaaccaactggtcgtacaataaataggtcattacttttttcacaagaagatattaaacaggcctatcaatttattaatagattttcagttatacagttacgtgaaaactttagctttgataaacactttgaagaacggttggtatgttatttatggaaagcagggatttctactttttacacgcacgaaatcagtaaaatgataaaaaaaatagcagactatgaaaaatctaaaaaaggtagattaaacccaatacgtgaccgagccttatatatggtaaatggtcttgtaatgaatagagcttcttcccaaagtgaacatgctacttataaactaaaccaatataaaaaacagaaggaacaggaaaaacaacaacaggagcaacaaagatcaagagtaccgttctataattggttggaggaaagagaagaacaaaccgaaggtcaactacccaccacttaaagcctaacggcttttgaagtggggcttgtaaaaagccctagttgactaccccaagtctttcgaggactacgttggaaaggtcatgacacctacaaatgctcctctagttcgtagccactgtcgttgatggttaaaagtcctgatgggtagggacggtgctgtcaacatcacaagcccttccaacatgggggaagaggaagaacactccgagaaaggagggggctgtcgtacacgccttgttcgtgtacgtgatttttaacacttttatctctaatataatctctccttgagttagcagagactaagaataaaacacattaggattttttatctacataaggaggttcaatacatgcctactatttcgtttaagggaaagtcttttgtacaaaatcatcacttgactgtaaaatatcatgaattgatcccagaaccagaaaaaagtctgaccgataaagttagtcttcatgacaatcttatcattcatggggacaatttaaaggcgttgaaagctctactacctacatatgctggtaagatagattgcatctatattgacccaccatacaatactggaactgaaaaatggatttataatgataatgtcaactccccaatgattagggaatggcttggaaaagtggtagacaaagaagacttatcccgacatgataagtggctttgtatgatgatgccgaggttaaaactgttgaaagagttgttgtcagaagacggagtgatatttgtaagcattgactacaatgaaatacaccatcttacgtgccttatgaacgaaatattcggtgaggagaattttcgtgacgctattatcattcgtagaggagtaaaaaatgttcaagcgcaatttgacacaattgattctctttcaaatggttatgagtctattttggtttacactaaacagccatctcgacgatttaataaggtttatgaagatgtagaagaaaagcctggtagttggaataatcattggagaggtacagaccgtaaaactatgagatatgaattatttggggttactccgacagaaggtcaatggagatgggggaaagaacgtagtctccaggctattgaaaactatcaaatgatgttagatgaacttagacaaaaaggcattactaatccaactcaagaggatattgataaatggtatcttgaatatgtagaaaataatggggaagatattgacttgttacgacaaaatgataatggcacgattgagcactttgttccaccgactagcaaaaagttgttaagtaatgcctggtttgacttaaaacccaacggttctagtcaattaaagaagatatttggaaggaaggttttcgataaccctaaatcaattgatttggtaaaaagactaatacaatttgcgactgaaaacaaagaagcgattgtacttgactcatttgcagggagtggcactactgctcatgcagtattatcgcttaacaaacaagatggagggaatcgtcgtttcatccttattgagatggaagaatatgcacatgagattaccgcagaacgcggatctttatcgatttgcatgcaagctaattcggtggaaacgaggtcatcatttccttccgaaaaaacggttgcatttaaatcttacatatgtaatactttcaaagactacatttgtaagatttgatgtttgagtcggctgaaagatcgtacgtaccaattattgtttcgtgattgttcaagccataacactgtagggatagtggaaagagtgcttcatctggttacgatcaatcaaatattcaaacggagggagacgattttgatgaaaccagtaacgttatacgatgtcgcagagtatgccggtgtctcttatcagaccgtttcccgcgtggtgaaccaggccagccacgtttctgcgaaaacgcgggaaaaagtggaagcggcgatggcggagctgaattacattcccaaccgcgtggcacaacaactggcgggcaaacagtcgttgctgattggcgttgccacctccagtctggccctgcacgcgccgtcgcaaattgtcgcggcgattaaatctcgcgccgatcaactgggtgccagcgtggtggtgtcgatggtagaacgaagcggcgtcgaagcctgtaaaacggcggtgcacaatcttctcgcgcaacgcgtcagtgggctgatcattaactatccgctggatgaccaggatgccattgctgtggaagctgcctgcactaatgttccggcgttatttcttgatgtctctgaccagacacccatcaacagtattattttctcccatgaagacggtacgcgactgggcgtggagcatctggtcgcattgggtcaccagcaaatcgcgctgttagcgggcccattaagttctgtctcggcgcgtctgcgtctggctggctggcataaatatctcactcgcaatcaaattcagccgatagcggaacgggaaggcgactggagtgccatgtccggttttcaacaaaccatgcaaatgctgaatgagggcatcgttcccactgcgatgctggttgccaacgatcagatggcgctgggcgcaatgcgcgccattaccgagtccgggctgcgcgttggtgcggatatctcggtagtgggatacgacgataccgaagacagctcatgttatatcccgccgttaaccaccatcaaacaggattttcgcctgctggggcaaaccagcgtggaccgcttgctgcaactctctcagggccaggcggtgaagggcaatcagctgttgcccgtctcactggtgaaaagaaaaaccaccctggcgcccaatacgcaaaccgcctctccccgcgcgttggccgattcattaatgcagctggcacgacaggtttcccgactggaaagcgggcagtgagcgcaacgcaattaatgtgagttaggatcgctaccttaagagagacgcgttatcgggggttagttcgtcatcattgatgagggttgattatcacagtttattactctgaattggctatccgcgtgtgtacctctacctggagtttttcccacggtggatatttcttcttgcgctgagcgtaagagctatctgacagaacagttcttctttgcttcctcgccagttcgctcgctatgctcggttacacggctgcggcgagcgctagtgataataagtgactgaggtatgtgctcttcttatctccttttgtagtgttgctcttattttaaacaactttgcggttttttgatgactttgcgattttgttgttgctttgcagtaaattgcaagatttaataaaaaaacgcaaagcaatgattaaaggatgttcagaatgaaactcatggaaacacttaaccagtgcataaacgctggtcatgaaatgacgaaggctatcgccattgcacagtttaatgatgacagcccggaagcgaggaaaataacccggcgctggagaataggtgaagcagcggatttagttggggtttcttctcaggctatcagagatgccgagaaagcagggcgactaccgcacccggatatggaaattcgaggacgggttgagcaacgtgttggttatacaattgaacaaattaatcatatgcgtgatgtgtttggtacgcgattgcgacgtgctgaagacgtatttccaccggtgatcggggttgctgcccataaaggtggcgtttacaaaacctcagtttctgttcatcttgctcaggatctggctctgaaggggctacgtgttttgctcgtggaaggtaacgacccccagggaacagcctcaatgtatcacggatgggtaccagatcttcatattcatgcagaagacactctcctgcctttctatcttggggaaaaggacgatgtcacttatgcaataaagcccacttgctggccggggcttgacattattccttcctgtctggctctgcaccgtattgaaactgagttaatgggcaaatttgatgaaggtaaactgcccaccgatccacacctgatgctccgactggccattgaaactgttgctcatgactatgatgtcatagttattgacagcgcgcctaacctgggtatcggcacgattaatgtcgtatgtgctgctgatgtgctgattgttcccacgcctgctgagttgtttgactacacctccgcactgcagtttttcgatatgcttcgtgatctgctcaagaacgttgatcttaaagggttcgagcctgatgtacgtattttgcttaccaaatacagcaatagtaatggctctcagtccccgtggatggaggagcaaattcgggatgcctggggaagcatggttctaaaaaatgttgtacgtgaaacggatgaagttggtaaaggtcagatccggatgagaactgtttttgaacaggccattgatcaacgctcttcaactggtgcctggagaaatgctctttctatttgggaacctgtctgcaatgaaattttcgatcgtctgattaaaccacgctgggagattagataatgaagcgtgcgcctgttattccaaaacatacgctcaatactcaaccggttgaagatacttcgttatcgacaccagctgccccgatggtggattcgttaattgcgcgcgtaggagtaatggctcgcggtaatgccattactttgcctgtatgtggtcgggatgtgaagtttactcttgaagtgctccggggtgatagtgttgagaagacctctcgggtatggtcaggtaatgaacgtgaccaggagctgcttactgaggacgcactggatgatctcatcccttcttttctactgactggtcaacagacaccggcgttcggtcgaagagtatctggtgtcatagaaattgccgatgggagtcgccgtcgtaaagctgctgcacttaccgaaagtgattatcgtgttctggttggcgagctggatgatgagcagatggctgcattatccagattgggtaacgattatcgcccaacaagtgcttatgaacgtggtcagcgttatgcaagccgattgcagaatgaatttgctggaaatatttctgcgctggctgatgcggaaaatatttcacgtaagattattacccgctgtatcaacaccgccaaattgcctaaatcagttgttgctcttttttctcaccccggtgaactatctgcccggtcaggtgatgcacttcaaaaagcctttacagataaagaggaattacttaagcagcaggcatctaaccttcatgagcagaaaaaagctggggtgatatttgaagctgaagaagttatcactcttttaacttctgtgcttaaaacgtcatctgcatcaagaactagtttaagctcacgacatcagtttgctcctggagcgacagtattgtataagggcgataaaatggtgcttaacctggacaggtctcgtgttccaactgagtgtatagagaaaattgaggccattcttaaggaacttgaaaagccagcaccctgatgcgaccacgttttagtctacgtttatctgtctttacttaatgtcctttgttacaggccagaaagcataactggcctgaatattctctctgggcccactgttccacttgtatcgtcggtctgataatcagactgggaccacggtcccactcgtatcgtcggtctgattattagtctgggaccacggtcccactcgtatcgtcggtctgattattagtctgggaccacggtcccactcgtatcgtcggtctgataatcagactgggaccacggtcccactcgtatcgtcggtctgattattagtctgggaccatggtcccactcgtatcgtcggtctgattattagtctgggaccacggtcccactcgtatcgtcggtctgattattagtctggaaccacggtcccactcgtatcgtcggtctgattattagtctgggaccacggtcccactcgtatcgtcggtctgattattagtctgggaccacgatcccactcgtgttgtcggtctgattatcggtctgggaccacggtcccacttgtattgtcgatcagactatcagcgtgagactacgattccatcaatgcctgtcaagggcaagtattgacatgtcgtcgtaacctgtagaacggagtaacctcggtgtgcggttgtatgcctgctgtggattgctgctgtgtcctgcttatccacaacattttgcgcacggttatgtggacaaaatacctggttacccaggccgtgccggcacgttaaccgggctgcatccgatgcaagtgtgtcgctgtcgacgagctcgcgagctcggacatgaggttgccccgtattcagtgtcgctgatttgtattgtctgaagttgtttttacgttaagttgatgcagatcaattaatacgatacctgcgtcataattgattatttgacgtggtttgatggcctccacgcacgttgtgatatgtagatgataatcattatcactttacgggtcctttccggtgatccgacaggttacggggcggcgacctcgcgggttttcgctatttatgaaaattttccggtttaaggcgtttccgttcttcttcgtcataacttaatgtttttatttaaaataccctctgaaaagaaaggaaacgacaggtgctgaaagcgagctttttggcctctgtcgtttcctttctctgtttttgtccgtggaatgaacaatggaagtccgagctcatcgctaataacttcgtatagcatacattatacgaagttatattcgat

SEQ ID NO: 162 - DNA, 30574 bp, synthetic construct
  misc_feature 1..30574: note = seed plasmid 3
  source 1..30574: mol_type = other DNA
gcggccgcttggccactccctctctgcgcgctcgctcgctcactgaggccgggcgaccaaaggtcgcccgacgcccgggctttgcccgggcggcctcagtgagcgagcgagcgcgcagagagggagtggccaactccatcactaggggttcctggccttgatggccaattcgattcgattagggcctacttggcctaatagtaatcaattacggggtcattagttcatagcccatatatggagttccgcgttacataacttacggtaaatggcccgcctggctgaccgcccaacgacccccgcccattgacgtcaataatgacgtatgttcccatagtaacgccaatagggactttccattgacgtcaatgggtggagtatttacggtaaactgcccacttggcagtacatcaagtgtatcatatgccaagtacgccccctattgacgtcaatgacggtaaatggcccgcctggcattatgcccagtacatgaccttatgggactttcctacttggcagtacatctacgtattagtcatcgctattaccatggtgatgcggttttggcagtacatcaatgggcgtggatagcggtttgactcacggggatttccaagtctccaccccattgacgtcaatgggagtttgttttggcaccaaaatcaacgggactttccaaaatgtcgtaacaactccgccccattgacgcaaatgggcggtaggcgtgtacggtgggaggtctatataagcagagctggtttagtgaaccgtcagatgccaccatggtgagcaagggcgaggagctgttcaccggggtggtgcccatcctggtcgagctggacggcgacgtaaacggccacaagttcagcgtgtccggcgagggcgagggcgatgccacctacggcaagctgaccctgaagttcatctgcaccaccggcaagctgcccgtgccctggcccaccctcgtgaccaccctgacctacggcgtgcagtgcttcagccgctaccccgaccacatgaagcagcacgacttcttcaagtccgccatgcccgaaggctacgtccaggagcgcaccatcttcttcaaggacgacggcaactacaagacccgcgccgaggtgaagttcgagggcgacaccctggtgaaccgcatcgagctgaagggcatcgacttcaaggaggacggcaacatcctggggcacaagctggagtacaactacaacagccacaacgtctatatcatggccgacaagcagaagaacggcatcaaggtgaacttcaagatccgccacaacatcgaggacggcagcgtgcagctcgccgaccactaccagcagaacacccccatcggcgacggccccgtgctgctgcccgacaaccactacctgagcacccagtccgccctgagcaaagaccccaacgagaagcgcgatcacatggtcctgctggagttcgtgaccgccgccgggatcactctcggcatggacgagctgtacaagtaagggtggcatccctgtgacccctccccagtgcctctcctggccctggaagttgccactccagtgcccaccagccttgtcctaataaaattaagttgcatcattttgtctgactaggtgtccttctataatattatggggtggaggggggtggtatggagcaaggggcaagttgggaagacaacctgtagggcctgcggggtctattgggaaccaagctggagtgcagtggcacaatcttggctcactgcaatctccgcctcctgggttcaagcgattctcctgcctcagcctcccgagttgttgggattccaggcatgcatgaccaggctcagctaatttttgtttttttggtagagacggggtttcaccatattggccaggctggtctccaactcctaatctcaggtgatctacccaccttggcctcccaaattgctgggattacaggcgtgaaccactgctcccttccctgtccttaggaacccctagtgatggagttggccactccctctctgcgcgctcgctcgctcactgaggccgggcgaccaaaggtcgcccgacgcccgggctttgcccgggcggcctcagtgagcgagcgagcgcgcagagagggagtggccaaggcctgattggccgtagatgtacctggacatccaggtgattcctgcggcggtagtggaagcccgaggaaactcgcgtacgcggttccaaatgttgcgtagcggcatgaagtagttcattgtaggcacggtttgaccagtgaggcgcgcgcagtcattgatgctctatagacacgaagaaaatgaaagcgttcagcgactcgactctgtagcctggaggaacgtgaacgggttgggtcgcggtgtaccccggttcaagacttgtactcgagccggccggagccgcggctaacgtggtattggcactcccgtctcgacccagcctacaaaaatccaggatacggaatcgagtcgttttgctggttgctgaatggcagggaagtgagtcctatttttttttttgccgctcagatgcatcccgtgctgcgacagatgcgtccccaacaacagcccccctcgcagcagcagcaaccacaaaaggctgtccctgcaactactgcaactgccgccgactggagtgccaaacaacatgcttcattctcctaaagtccagcccaccctgtgtgacaatcaaaaagcactctaccattttctcaatacccattcgccttattttcgctcccatcgtacacacatcgaaagggccactgcgttcgaccgtatggatgtgcaataatgactcatgtaaacaacgtgttgaataaacagcactttattttttacacgtatcaaggctctggattacttatttatttacaagtcgaatgggttctgacgagaatcagaatgacccgcgggcagtgatacgttgcggaactgatacttgggttgccacttgaattcgggaatcaccaacttgggaaccggtatatcgggtaggatgtcactccacagctttctggtcagctgcaaagctcccagcaggtcaggagccgaaatcttgaaatcacaattaggaccagtgctctgagcgcgagagttgcggtacaccggattgcagcactgaaacaccatcagcgacggatgtctcacgcttgccagcacggtgggatctgcaatcatgcccacatccagatcttcagcattggcaatgctgaacggggtcatcttgcaggtctgcctacccatggcgggcacccaattaggcttgtggttgcaatcgcagtgcagggggattagtatcatcttggcctgatcctgtctgattcctggatacacggctctcatgaaagcatcatattgcttgaaagcctgctgggctttactaccctcggtatagaacatcccgcaggacctgctcgaaaactggttagctgcgcagccggcatcattcacacagcagcgggcgtcattgttggctatttgcaccacacttctgccccagcggttttgggtgattttggttcgctcgggattctccttcaaggctcgttgtccattctcgctggccacatccatctcgataatctgctccttctgaatcataatagtgccatgcaggcacttcagcttgccctcataatcattgcagccatgaggccacaacgcacagcctgtacattcccaattatggtgggcgatctgagaaaaagaatgtatcattccctgcagaaatcttcccatcatcgtgctcagtgtcttgtgactagtgaaagttaactggatgcctcggtgctcctcgtttacgtactggtgacagatgcgcttgtattgttcgtgctgctcaggcattagtttaaaagaggttctaagttcgttatccagcctgtacttctccatcagtacacacatcacttccatgcccttctcccaagcagacaccaggggcaagctaatcggattcttaacagtacaggcagcagctcctttagccagaggatcatctttggcaatcttttcaatgcttcttttgccatccttctcaacgatgcgcacgggcgggtagctgaaacctactgctacaagctgcgcctcttctctttcttcttcgctgtcttgactgatgtcttgcatgggaacatgtttggtcttccttggcttctttttggggggtatcgggggaggaggactgtcgctccgttccggagacagggaggattgtgaagtttcgctcaccattaccaactgactgtcggtagaagaacctgaccccacacggcgacaggtgtttctcttcgggggcagaggtggaggcgattgcgaagggctgcggtccgacctggaaggcggatgactggcagaaccccttccgcgttcgggggtgtgctccctgtggcggtcgcttaactgatttccttcgcggctggccattgtgttctcctaggcagagaaacaacagacatggaaactcagccattgctgtcaacatcgccacaagtgccatcacatctcgtcgtcagcgacgaggaaaaggagcagagcttaaccattccaccgcccagtcctgccaccacctctaccctagaagataaggaggtcgacgcatctcatgacatgcagaataaaaaagcgaaagagtctgaaacagacatcgagcaagacccgggctatgtgacaccggtggaacacgaggaagagttgaaacgctttctagagagagaggatgaaaactgcccaaaacagcaagcggataactatcaccaagatgctggaaatagggatcagaacaccgactacctcatagggcttgacggggaagacgcgctccttaaacatctagcaagacagtcactcatagtcaaggatgcattattggacagaactgaagtgcccatcagtgtggaagagctcagccgcgcctacgagcttaaccttttttcacctcgtactccccccaaacgccagccaaacggcacctgcgagccaaatcctcgcttaaacttttatccagcttttgctgtgccagaagtactcgctacttatcacatcttttttaaaaatcaaaaaattccagtctcctgccgcgctaatcgcacccgcgctgacgccctacttaatctgggacctggttcacgcttacctgatatagcttccttggaagaggttccaaaaatcttcgagggtctgggcaataatgagactcgggccgcaaatgctctgcaaaagggagaaaatggcatggatgagcatcacagcgttctggtggaattggagggcgataatgccagactcgcagtactcaagcgaagcgtcgaggtcacacactttgcataccccgctgtcaacctgccccctaaagttatgacggcggtcatggaccagttactcattaagcgcgcaagtcccctttcagaagacatgcatgacccagacgcctgtgatgagggtaaaccagtggtcagtgatgagcagctaacccgatggctggacaccgactctccccgggatttggaagagcgtcgcaagcttatgatggccgtagtgctggttaccgtagaactagagtgtctccggcgtttctttaccgattcagaaaccttgcgcaaactcgaagagaatctgcactacacttttagacacggctttgtgcggcaggcgtgcaagatatctaacgtggaactcaccaacctggtttcctacatgggtattctgcatgagaatcgtctaggacaaagcgtgctgcacagcacccttaagggggaagcccgccgtgattacatccgcgattgtgtctatctctacctgtgccacacgtggcaaaccggcatgggtgtatggcagcaatgtttagaagaacagaacttgaaagagcttaacaagctcttacagaaatctcttaaggttctgtggacagggttcgacgagcgcaccgtcgcttccgacctggcagacctcatcttcccagagcgtcttagggttactttgcgaaacggactgcctgactttatgagccagagcatgcttaacaattttcgctctttcatcctggaacgctccggtatcctgcccgccacctgctgcgcactgccctccgactttgtgcctctcacctaccgcgagtgccccccgccgctatggagtcactgctacctgttccgtctggccaactacctctcctaccactcggatgtgatcgaggatgtgagcggagacggcttgctggagtgtcactgccgctgcaatctgtgcacgccccaccggtccctagcttgcaacccccagttgatgagcgaaacccagataataggcacctttgaactgcaaggccccagcagccaaggcgatgggtcttctcctgggcaaagtttaaaactgaccccgggactgtggacctctgcctacttgcgcaagtttgccccggaagattaccacccctatgaaatcaagttctatgaggaccaatcacagcctccaaaggccgaactttcggcctgcgtcatcacccagggggcaattctagcccaattgcaagccatccaaaaatcccgccaagaatttctactgaaaaagggtaagggggtctaccttgacccccagaccggcgaggaactcaacacaaggttccctcaggatgtcccaacgacgagaaagcaagaagttgaaggtgcagccgccgcccccagaagatatggaggaagattgggacagtcaggcagaggaagcggaggaggacagtctggaggacagtctggaggaagacagtttggaggaggaaaacgaggaggcagaggaggtggaagaagtaaccgccgacaaacagttatccccggctgcggagacaagcaacagcgctatcatctccgctccgagtcgaggaacgcggcggcgtcccagcagtagatgggacgagaccggacgcttcccgaacccaaccaccgcttccaagaccggtaagaaggatcggcagggatacaagtcctggcgggggcataagaatgccatcatctcctgcttgcatgagtgcgggggaaacatatccttcacgcgacgctacttgctattccaccatggggtgaactttccacgcaatgttttgcattactaccgtcacctccacagcccctactatagccagcaaatcccggcaatctcgacagaaaaagacagcggcggcgacctccaacagaaaaccagcagcggcagttaaaaaatacacaacaagtgcagcaacaggaggattaaagattacagccaacgagccagcgcaaacccgagagctaagaaatcggatctttccaaccctgtatgccatcttccagcagagtcggggccaagagcaggaactgaaaataaaaaaccgatctttgcgttcgctcaccagaagttgtttgtatcacaagagcgaagatcaacttcagcgcactcttgaggacgccgaggctctcttcaacaagtactgcgcgctgactcttaaagagtaggcagcgaccgcgcttattcaaaaaaggcgggaattacatcatcctcgtcatgagtaaagaaattcccacgccttacatgtggagttatcagccccaaatgggattggcggcaggcgcctcccaggactactccacccgcatgaattggctcagcgccgggccttctatgatttctcgagttaatgatatacgcgcctaccgaaaccaaatacttttggaacagtcagctcttaccaccacgccccgccaacaccttaatcccagaaattggcccgccgccctagtataccaggaaagtcccgctcccaccactgtattacttcctcgagacgcccaggccgaagtccaaatgactaatgcaggtgcgcagttagctggcggctccaccctatgtcgtcacaggcctcggtgcttaaccaaagagcaataagagctgatacatcatattgtattcgtataacttggtcctggaacacaggagatgccccagaggggcaaacctctgctacaaccctagttacctccccatttaccttttactacatcagagaagacgactgacaaataaagtttaacttgtttatttgaaaatcaattcacaaactccgagtagttattttgcctcccccttcccatttaacagaatataccaatctctccccacgcacagctttaaacatttggataccattagagatagacatggttttagattccacattccaaacagtttcagagcgagccaatctggggtcagtgatagataaaaatccatcgggatagtcttttaaagcgctttcacagtccaactgatgcggatgcgactccggagtctggatcacggtcatctggaagaagaacgatgggaatcataatccgaaaacgggatcgggcgattgtgtctcatcaaacccacaagcagccgctgtctgcgtcgctccgtgcgactgctgtttatgggatcgggatccacagtgtcctgaagcatgattttaatagcccttaacattaactttctggtgcgatgcgcgcagcaacgcattcttatttcacttagattaatacagtaggtacagcacattatcacaatattgtttaataaaccataattaaaagcactccagccaaaactcatatctgatataatcgcccctgcatgaccatcataccaaagtttaatataaattaaatgacgttccctcaaaaacacactacccacatacatgatctcttttggcatgtgcatattaacaatctgtctgtaccatggacaacgttggttaatcatgcagcccaatataaccttccggaaccacactgccaacaccgctcccccagccatgcattgaagtgaaccctgctgattacaatgacaatgaagaatccaattctctcgaccgtgaatcacttgagaatgaaaaatatctatagtagcacaacatagacataaatgcatgcatcttctcataatttttaactcctcaggatttagaaacatatcccaaggaataggaagctcttgcagaacagtaaagctggcagaacaaggaagaccacgaacacaacttacactatgcatagtcatagtatcacaatctggcaacagcgggtggtcttcagtcatagaagctcgggtttcattttcctcacaacgtggtaactgggctctggtgtaaggatgatgtctggcgcatgatgtcgagcgtgcgcacaaccttgtcataatggagttgcttcctgacattctcgtattttgtatagcaaaacgcggccctggcagaacacactcttcttcgccttttatcctgccgcttagcgtgttccgtgtgatagttcaagtacagccacactcttaagttggtcaaaagaatgctggcttcagttgtaatcaaaactccatcacatctaatcgttctgaggaaatgatccacggtagcatatgcaaatcccaaccaagcaatgcaactggattgcgtttcaagcaggagaggagagggaagagacggaagaaccatgttaatttttattccaaacgatctcgcagtacttcaaattgtagatcgcgcagatggcatctgtcgcccccactgtgttggtgaaaaagcacagctagatcaaaagaaatgcgattttcaaggtgctcaacggtggcttccagcaaagcctccacgcgcacatccaagaacaaaagaataccaaaagaaggagcattttctaactcctcaatcatcatattacagtcctgcaccattcccagataattttcagctttccagccttggattattcgtgtcatttcttgtggtaaatccaatccacacattacaaacaggtcccggagggcgccctccaccaccattcttaaacacaccctcataatgacaaaatatcttgctcctgtgtcacctgtagcaaattgagaatggcaacatcaattgacatgccgttggctctaagttcttctctaagttctagttgtaaatactctttcatattatcaccaaactgcttagccagaagccccccgggaacaagagcaggacacgctacagtgcagtacaagcgcagacctccccaattggctccagcaaaaacaagattggaataagcatattgggaaccaccagtaatgtcatcaaagttgctggaaatataatcaggcagagtttgttgtaaaaattgaataaaagaaaaatttgccaaaaaaacattcaaaacctctgggatgcaaatgcaataagttaccgcgctgcgctccaacattgttagttttgaatgagtctgcaaaaaataaaaaaacaagcgtcatatcagagtagcctgacgaacaggtggataaatcagtctttccatcacaagacaagccacagggtctccagcccgaccctcgtaaaacctgtcatcgtgattaaacaacagcaccgaaagttcctcgcggtgaccagcatgaataattcttgatgaagcatacaatccaaacatgttagcatcagttaaagacaaaaaacagccaatatagcctctgggtataattatgcttaatcgtaaatatagcaaagccacccctcgcggatacaaagtaaaaggcacaggagaataaaaaatataattattcctttgctgctgttcaggcaacgtcgcccccggtccctctaaatacacatacaaagcctcatcagccatggcttaccagacaaagtacagcaggcacacaaagcacaagctctaaagtcactcaccaacctgtccacagtatatatacacaaaccctaaactgacgtaatggggctaaagtacacaaaatcccgccaaacccaacacacaccccgaaactgcgtcaccacaaaagtacagtttcacttccgcaatcccaacaagcggcacttcctctttctcacgggacgtcacatccgcttaacttgcaaccggcctatgtggccggaggggtggagtcgtgacgtgaattacgtcatagggttagggaggtcctgtattagaggtcacgtgagtgttttgcgacattttgcgacaccatgtggtcacgctgggtatttaagcccgagtgagcacgcagggtctccattttgaagcgggaggtttgaacgcgcagccgccatgccggggttttacgagattgtgattaaggtccccagcgaccttgacgagcatctgcccggcatttctgacagctttgtgaactgggtggccgagaaggaatgggagttgccgccagattctgacatggatctgaatctgattgagcaggcacccctgaccgtggccgagaagctgcagcgcgactttctgacggaatggcgccgtgtgagtaaggctccggaggcccttttctttgtgcaatttgagaagggagagagctacttccacatgcacgtgctcgtggaaaccaccggggtgaaatccatggttttgggacgtttcctgagtcagattcgcgaaaaactgattcagagaatttaccgcgggatcgagccgactttgccaaactggttcgcggtcacaaagaccagaaatggcgccggaggcgggaacaaggtggtggatgagtgctacatccccaattacttgctccccaaaacccagcctgagctccagtgggcgtggactaatatggaacagtatttaagcgcctgtttgaatctcacggagcgtaaacggttggtggcgcagcatctgacgcacgtgtcgcagacgcaggagcagaacaaagagaatcagaatcccaattctgatgcgccggtgatcagatcaaaaacttcagccaggtacatggagctggtcgggtggctcgtggacaaggggattacctcggagaagcagtggatccaggaggaccaggcctcatacatctccttcaatgcggcctccaactcgcggtcccaaatcaaggctgccttggacaatgcgggaaagattatgagcctgactaaaaccgcccccgactacctggtgggccagcagcccgtggaggacatttccagcaatcggatttataaaattttggaactaaacgggtacgatccccaatatgcggcttccgtctttctgggatgggccacgaaaaagttcggcaagaggaacaccatctggctgtttgggcctgcaactaccgggaagaccaacatcgcggaggccatagcccacactgtgcccttctacgggtgcgtaaactggaccaatgagaactttcccttcaacgactgtgtcgacaagatggtgatctggtgggaggaggggaagatgaccgccaaggtcgtggagtcggccaaagccattctcggaggaagcaaggtgcgcgtggaccagaaatgcaagtcctcggcccagatagacccgactcccgtgatcgtcacctccaacaccaacatgtgcgccgtgattgacgggaactcaacgaccttcgaacaccagcagccgttgcaagaccggatgttcaaatttgaactcacccgccgtctggatcatgactttgggaaggtcaccaagcaggaagtcaaagactttttccggtgggcaaaggatcacgtggttgaggtggagcatgaattctacgtcaaaaagggtggagccaagaaaagacccgcccccagtgacgcagatataagtgagcccaaacgggtgcgcgagtcagttgcgcagccatcgacgtcagacgcggaagcttcgatcaactacgcagacaggtaccaaaacaaatgttctcgtcacgtgggcatgaatctgatgctgtttccctgcagacaatgcgagagaatgaatcagaattcaaatatctgcttcactcacggacagaaagactgtttagagtgctttcccgtgtcagaatctcaacccgtttctgtcgtcaaaaaggcgtatcagaaactgtgctacattcatcatatcatgggaaaggtgccagacgcttgcactgcctgcgatctggtcaatgtggatttggatgactgcatctttgaacaataaatgatttaaatcaggtggcctctatggccatggctgccgatggttatcttccagattggctcgaggacactctctctgaaggaataagacagtggtggaagctcaaacctggcccaccaccaccaaagcccgcagagcggcataaggacgacagcaggggtcttgtgcttcctgggtacaagtacctcggacccttcaacggactcgacaagggagagccggtcaacgaggcagacgccgcggccctcgagcacgacaaagcctacgaccggcagctcgacagcggagacaacccgtacctcaagtacaaccacgccgacgcggagtttcaggagcgccttaaagaagatacgtcttttgggggcaacctcggacgagcagtcttccaggcgaaaaagagggttcttgaacctctgggcctggttgaggaacctgttaagacggctccgggaaaaaagaggccggtagagcactctcctgtggagccagactcctcctcgggaaccggaaaggcgggccagcagcctgcaagaaaaagattgaattttggtcagactggagacgcagactcagtacctgacccccagcctctcggacagccaccagcagccccctctggtctgggaactaatacgatggctacaggcagtggcgcaccaatggcagacaataacgagggcgccgacggagtgggtaattcctcgggaaattggcattgcgattccacatggatgggcgacagagtcatcaccaccagcacccgaacctgggccctgcccacctacaacaaccacctctacaaacaaatttccagccaatcaggagcctcgaacgacaatcactactttggctacagcaccccttgggggtattttgacttcaacagattccactgccacttttcaccacgtgactggcaaagactcatcaacaacaactggggattccgacccaagagactcaacttcaagctctttaacattcaagtcaaagaggtcacgcagaatgacggtacgacgacgattgccaataaccttaccagcacggttcaggtgtttactgactcggagtaccagctcccgtacgtcctcggctcggcgcatcaaggatgcctcccgccgttcccagcagacgtcttcatggtgccacagtatggatacctcaccctgaacaacgggagtcaggcagtaggacgctcttcattttactgcctggagtactttccttctcagatgctgcgtaccggaaacaactttaccttcagctacacttttgaggacgttcctttccacagcagctacgctcacagccagagtctggaccgtctcatgaatcctctcatcgaccagtacctgtattacttgagcagaacaaacactccaagtggaaccaccacgcagtcaaggcttcagttttctcaggccggagcgagtgacattcgggaccagtctaggaactggcttcctggaccctgttaccgccagcagcgagtatcaaagacatctgcggataacaacaacagtgaatactcgtggactggagctaccaagtaccacctcaatggcagagactctctggtgaatccgggcccggccatggcaagccacaaggacgatgaagaaaagttttttcctcagagcggggttctcatctttgggaagcaaggctcagagaaaacaaatgtggacattgaaaaggtcatgattacagacgaagaggaaatcaggacaaccaatcccgtggctacggagcagtatggttctgtatctaccaacctccagagaggcaacagacaagcagctaccgcagatgtcaacacacaaggcgttcttccaggcatggtctggcaggacagagatgtgtaccttcaggggcccatctgggcaaagattccacacacggacggacattttcacccctctcccctcatgggtggattcggacttaaacaccctcctccacagattctcatcaagaacaccccggtacctgcgaatccttcgaccaccttcagtgcggcaaagtttgcttccttcatcacacagtactccacgggacaggtcagcgtggagatcgagtgggagctgcagaaggaaaacagcaaacgctggaatcccgaaattcagtacacttccaactacaacaagtctgttaatgtggactttactgtggacactaatggcgtgtattcagagcctcgccccattggcaccagatacctgactcgtaatctgttgcttgttaatcaataaaccgtttaattcgtttcagttgaactttggtctctgcgtatttctttcttatctagtttccatggctacgtagataagtagcatggcgggttaatcattaactacagcccgggcgtttaaacagcgggcggaggggtggagtcgtgacgtgaattacgtcatagggttagggaggtcctgtattagaggtcacgtgagtgttttgcgacattttgcgacaccatgtggtctcgctgggggggggggcccgagtgagcacgcagggtctccattttgaagcgggaggtttgaacgcggccgcaaaaggccttcttggccaccccgggccgtcgaccaattctcatgtttgacagcttatcatcgaatttctgccattcatccgcttattatcacttattcaggcgtagcaaccaggcgtttaagggcaccaataactgccttaaaaaaattacgccccgccctgccactcatcgcagtactgttgtaattcattaagcattctgccgacatggaagccatcacaaacggcatgatgaacctgaatcgccagcggcatcagcaccttgtcgccttgcgtataatatttgcccatggtgaaaacgggggcgaagaagttgtccatattggccacgtttaaatcaaaactggtgaaactcacccagggattggctgagacgaaaaacatattctcaataaaccctttagggaaataggccaggttttcaccgtaacacgccacatcttgcgaatatatgtgtagaaactgccggaaatcgtcgtggtattcactccagagcgatgaaaacgtttcagtttgctcatggaaaacggtgtaacaagggtgaacactatcccatatcaccagctcaccgtctttcattgccatacggaattccggatgagcattcatcaggcgggcaagaatgtgaataaaggccggataaaacttgtgcttatttttctttacggtctttaaaaaggccgtaatatccagctgaacggtctggttataggtacattgagcaactgactgaaatgcctcaaaatgttctttacgatgccattgggatatatcaacggtggtatatccagtgatttttttctccattttagcttccttagctcctgaaaatctcgataactcaaaaaatacgcccggtagtgatcttatttcattatggtgaaagttggaacctcttacgtgccgatcaacgtctcattttcgccaaaagttggcccagggcttcccggtatcaacagggacaccaggatttatttattctgcgaagtgatcttccgtcacaggtatttattcgcgataagctcatggagcggcgtaaccgtcgcacaggaaggacagagaaagcgcggatctgggaagtgacggacagaacggtcaggacctggattggggaggcggttgccgccgctgctgctgacggtgtgacgttctctgttccggtcacaccacatacgttccgccattcctatgcgatgcacatgctgtatgccggtataccgctgaaagttctgcaaagcctgatgggacataagtccatcagttcaacggaagtctacacgaaggtttttgcgctggatgtggctgcccggcaccgggtgcagtttgcgatgccggagtctgatgcggttgcgatgctgaaacaattatcctgagaataaatgccttggcctttatatggaaatgtggaactgagtggatatgctgtttttgtctgttaaacagagaagctggctgttatccactgagaagcgaacgaaacagtcgggaaaatctcccattatcgtagagatccgcattattaatctcaggagcctgtgtagcgtttataggaagtagtgttctgtcatgatgcctgcaagcggtaacgaaaacgatttgaatatgccttcaggaacaatagaaatcttcgtgcggtgttacgttgaagtggagcggattatgtcagcaatggacagaacaacctaatgaacacagaaccatgatgtggtctgtccttttacagccagtagtgctcgccgcagtcgagcgacagggcgaagccctcgagtgagcgaggaagcaccagggaacagcacttatatattctgcttacacacgatgcctgaaaaaacttcccttggggttatccacttatccacggggatatttttataattattttttttatagtttttagatcttcttttttagagcgccttgtaggcctttatccatgctggttctagagaaggtgttgtgacaaattgccctttcagtgtgacaaatcaccctcaaatgacagtcctgtctgtgacaaattgcccttaaccctgtgacaaattgccctcagaagaagctgttttttcacaaagttatccctgcttattgactcttttttatttagtgtgacaatctaaaaacttgtcacacttcacatggatctgtcatggcggaaacagcggttatcaatcacaagaaacgtaaaaatagcccgcgaatcgtccagtcaaacgacctcactgaggcggcatatagtctctcccgggatcaaaaacgtatgctgtatctgttcgttgaccagatcagaaaatctgatggcaccctacaggaacatgacggtatctgcgagatccatgttgctaaatatgctgaaatattcggattgacctctgcggaagccagtaaggatatacggcaggcattgaagagtttcgcggggaaggaagtggttttttatcgccctgaagaggatgccggcgatgaaaaaggctatgaatcttttccttggtttatcaaacgtgcgcacagtccatccagagggctttacagtgtacatatcaacccatatctcattcccttctttatcgggttacagaaccggtttacgcagtttcggcttagtgaaacaaaagaaatcaccaatccgtatgccatgcgtttatacgaatccctgtgtcagtatcgtaagccggatggctcaggcatcgtctctctgaaaatcgactggatcatagagcgttaccagctgcctcaaagttaccagcgtatgcctgacttccgccgccgcttcctgcaggtctgtgttaatgagatcaacagcagaactccaatgcgcctctcatacattgagaaaaagaaaggccgccagacgactcatatcgtattttccttccgcgatatcacttccatgacgacaggatagtctgagggttatctgtcacagatttgagggtggttcgtcacatttgttctgacctactgagggtaatttgtcacagttttgctgtttccttcagcctgcatggattttctcatactttttgaactgtaatttttaaggaagccaaatttgagggcagtttgtcacagttgatttccttctctttcccttcgtcatgtgacctgatacgcgtgctaccttaagagagtcaattcgcccttcccggtcgatatgaacagcttatttacataattcacgttattggtagttataaatgaaattcctaatatcggttatgaagtgaaattgaatttctacttgatctttctctctatttttgtaaaataaaattaagaatatttaaatattcaatgattcatttttgcagaaatcggaggaagaagaatatatgaaaacatttaacatttctcaacaagatccccccatattgttgtataagtgatgaaatactgaatttaaaacttagtttatatgtggtaaaatgttttaatcaagtttaggaggaattaattatgaagtgtaatgaataatgaatgtaacagggttcaattaaaagagggaagcgtatcattaaccctataaactacgtctgccctcattattggagggtgaaatgtgaatacatcctattcacaatcgaatttacgacacaaccaaattttaatttggctttgcattttatctttttttagcgtattaaatgaaatggttttgaacgtctcattacctgatattgcaaatgattttaataaaccaccagcgagtacaaactgggtgaacacagcctttatgttaaccttttccattggaacagctgtatatggaaagctatctgatcaattaggcatcaaaaggttactcctatttggaattataataaattgtttcgggtcggtaattgggtttgttggccattctttcttttccttacttattatggctcgttttattcaaggggctggtgcagctgcatttccagcactcgtaatggttgtagttgcgcgctatattccaaaggaaaataggggtaaagcatttggtcttattggatcgatagtagccatgggagaaggagtcggtccagcgattggtggaatgatagcccattatattcattggtcctatcttctactcattcctatgataacaattatcactgttccgtttcttatgaaattattaaagaaagaagtaaggataaaaggtcattttgatatcaaaggaattatactaatgtctgtaggcattgtattttttatgttgtttacaacatcatatagcatttcttttcttatcgttagcgtgctgtcattcctgatatttgtaaaacatatcaggaaagtaacagatccttttgttgatcccggattagggaaaaatataccttttatgattggagttctttgtgggggaattatatttggaacagtagcagggtttgtctctatggttccttatatgatgaaagatgttcaccagctaagtactgccgaaatcggaagtgtaattattttccctggaacaatgagtgtcattattttcggctacattggtgggatacttgttgatagaagaggtcctttatacgtgttaaacatcggagttacatttctttctgttagctttttaactgcttcctttcttttagaaacaacatcatggttcatgacaattataatcgtatttgttttaggtgggctttcgttcaccaaaacagttatatcaacaattgtttcaagtagcttgaaacagcaggaagctggtgctggaatgagtttgcttaactttaccagctttttatcagagggaacaggtattgcaattgtaggtggtttattatccatacccttacttgatcaaaggttgttacctatggaagttgatcagtcaacttatctgtatagtaatttgttattacttttttcaggaatcattgtcattagttggctggttaccttgaatgtatataaacattctcaaagggatttctaaatcgttaagggatcaactttgggagagagttcaaaattgatcctttttttataacaggaattgggcatcaaataaaacgaaaggctcagtcgaaagactgggcctttcgttttatctgttgtttgtcggtgaacgctctcctgagtaggacaaatccgccgggagcggatttgaacgttgcgaagcaacggcccggagggtggcgggcaggacgcccgccataaactgccaggcatcaaattaagcagaaggccatcctgacggatggcctttttgcgtttctacaaactcttcctgtcgtcatatctacaattctacacagcccagtccagactattcggcactgaaattatgggtgaagtggtcaagacctcactaggcaccttaaaaatagcgcaccctgaagaagatttatttgaggtagcccttgcctacctagcttccaagaaagatatcctaacagcacaagagcggaaagatgttttgttctacatccagaacaacctctgctaaaattcctgaaaaattttgcaaaaagttgttgactttatctacaaggtgtggcataatgtgtggaattgtgagcggataacaattaagctaattctatggtaaaagcattcctgaacccaatatccttatttttagtggacaaggccttgttctcatatggttgcttgagccagtgccttacaaggctcttccgctttggcaggctgttcaaaattatttattagagcaactcaaggaactaggcggagatccaaaagcaaccgatgcagcacgtgtttttcggattgctgggagcgtcaatagtaagaatggagcggaagtaagagcggaatatcggcacgattacagatatgagttaaggcagattcaatttgattaccttccagaactcaatgaggttattaatcccgctccacaaaagaaaaaacgggggcgtaaaaagaaagtagttcagttattcaatacctacaaactccattacgctcgcctattggatatagtgaaattggtggaactacgaaattatgaggtaactggatacagggaaatcatttgctttttataccgttattggttgtgctgttacacgaacgaccctgtagaggctttaaatcaaacacagacacttaatttacagttcactgagcctttacccttaaaagaggttgaaagggctacacggagcgcagaaaaggcgtgggaagcacgaaataacgaagaggctaaccggattgcaatcgaaaaaggatatcccagtgctggatacaatattagcaataaaaagttgattgaatggctagatatcacaccagaagaacagaagcatttacagacgattatagacgctaatgagaaacggagaagaaagcgggaaagggataggatttatcaagaacaaaaacgtcgtgagcggggagatatgacccgacaggagtatattaagcaacaacaggataaaacagatgataaattatttaaattgcaggagttattagaacagaatcccaaaatctcaaaaattaaattagcaaaaatacttggtgtagataaatcgcacttatacagactgctgaaacaactataactggaaaaaattagtgtctcatggttcgtcgcccttatattatgggcgttagcctgcttgctaattggataggtgttattgtcatttcaacgtcggacgttttggtagatgaacgtcggacgttatttgcttcaatagattgttgatgtattaagggttgcagtgaatcgacaagcaaaaagttatgacgttgtgaaaaaattgaatagaaaattggaaattacgtcggacgttctaacttaaaaaccctgttatatcaatgatttaaaaggaaattaacgtcataaaagacctttctgcaacaaaagtttttctggaagagttgaggttattttataggtattatggacttttgtagactttttgtgtactttttgtggactccacactcgctggtatcgtgttattttttaattgagatatgaatatggaaattaaacgttttaggcgttggtttggtgatgacaaaaaaataagagtacccgctcacaacggatactctttcgagaaatgtacgaaacgctataaataaaaaataactagatacatttacattgtatcacgtttcgtacatttctccaataacaaattgattggaggaatgcaaagtgaataatgaaccagtaaaacgtggtaagaagaacagatgggaattaaacctacctataatgacttatgtagtagctgatgattggattgataaactaggacacgaaacgtttactttatggttgaggttccatacttgggtagatagagaagatgaactccgagattatgatcgcatacctagaagttttgagaacatatataaaaagacactaggaatctcaaaaagtaagttttatagattgataaaacctttatgggaatatggattaatagacatcatagaatacgaagaatctaaccgtaattctactaaacctaaaaatataattgtttatgagtatcctttacacgaaatagaaagaaagtataaaccactagaaaaattaagagattgggataaagactataattccgtttctaaagaattaggtaaaacaggtggtagaccaaggaaaaaagatagtgaagaagaacccgaaaagaaacccgaagaagtaactaaaaagaaacgtaaatataagttaaaaagagttatccacaacggtttcaaaaatgaaacggtggagggtttcaaaaatgaaacggtggagggtttcaaaaatgaaacggtgaccgtttcaaaaataaaacccaataattattcaaatatctttaataacttatcaaatatttctactaatgtttcaaataatttattaattgatgatgatgaggaaatcgaaaatgaaccaactggtcgtacaataaataggtcattacttttttcacaagaagatattaaacaggcctatcaatttattaatagattttcagttatacagttacgtgaaaactttagctttgataaacactttgaagaacggttggtatgttatttatggaaagcagggatttctactttttacacgcacgaaatcagtaaaatgataaaaaaaatagcagactatgaaaaatctaaaaaaggtagattaaacccaatacgtgaccgagccttatatatggtaaatggtcttgtaatgaatagagcttcttcccaaagtgaacatgctacttataaactaaaccaatataaaaaacagaaggaacaggaaaaacaacaacaggagcaacaaagatcaagagtaccgttctataattggttggaggaaagagaagaacaaaccgaaggtcaactacccaccacttaaagcctaacggcttttgaagtggggcttgtaaaaagccctagttgactaccccaagtctttcgaggactacgttggaaaggtcatgacacctacaaatgctcctctagttcgtagccactgtcgttgatggttaaaagtcctgatgggtagggacggtgctgtcaacatcacaagcccttccaacatgggggaagaggaagaacactccgagaaaggagggggctgtcgtacacgccttgttcgtgtacgtgatttttaacacttttatctctaatataatctctccttgagttagcagagactaagaataaaacacattaggattttttatctacataaggaggttcaatacatgcctactatttcgtttaagggaaagtcttttgtacaaaatcatcacttgactgtaaaatatcatgaattgatcccagaaccagaaaaaagtctgaccgataaagttagtcttcatgacaatcttatcattcatggggacaatttaaaggcgttgaaagctctactacctacatatgctggtaagatagattgcatctatattgacccaccatacaatactggaactgaaaaatggatttataatgataatgtcaactccccaatgattagggaatggcttggaaaagtggtagacaaagaagacttatcccgacatgataagtggctttgtatgatgatgccgaggttaaaactgttgaaagagttgttgtcagaagacggagtgatatttgtaagcattgactacaatgaaatacaccatcttacgtgccttatgaacgaaatattcggtgaggagaattttcgtgacgctattatcattcgtagaggagtaaaaaatgttcaagcgcaatttgacacaattgattctctttcaaatggttatgagtctattttggtttacactaaacagccatctcgacgatttaataaggtttatgaagatgtagaagaaaagcctggtagttggaataatcattggagaggtacagaccgtaaaactatgagatatgaattatttggggttactccgacagaaggtcaatggagatgggggaaagaacgtagtctccaggctattgaaaactatcaaatgatgttagatgaacttagacaaaaaggcattactaatccaactcaagaggatattgataaatggtatcttgaatatgtagaaaataatggggaagatattgacttgttacgacaaaatgataatggcacgattgagcactttgttccaccgactagcaaaaagttgttaagtaatgcctggtttgacttaaaacccaacggttctagtcaattaaagaagatatttggaaggaaggttttcgataaccctaaatcaattgatttggtaaaaagactaatacaatttgcgactgaaaacaaagaagcgattgtacttgactcatttgcagggagtggcactactgctcatgcagtattatcgcttaacaaacaagatggagggaatcgtcgtttcatccttattgagatggaagaatatgcacatgagattaccgcagaacgcggatctttatcgatttgcatgcaagctaattcggtggaaacgaggtcatcatttccttccgaaaaaacggttgcatttaaatcttacatatgtaatactttcaaagactacatttgtaagatttgatgtttgagtcggctgaaagatcgtacgtaccaattattgtttcgtgattgttcaagccataacactgtagggatagtggaaagagtgcttcatctggttacgatcaatcaaatattcaaacggagggagacgattttgatgaaaccagtaacgttatacgatgtcgcagagtatgccggtgtctcttatcagaccgtttcccgcgtggtgaaccaggccagccacgtttctgcgaaaacgcgggaaaaagtggaagcggcgatggcggagctgaattacattcccaaccgcgtggcacaacaactggcgggcaaacagtcgttgctgattggcgttgccacctccagtctggccctgcacgcgccgtcgcaaattgtcgcggcgattaaatctcgcgccgatcaactgggtgccagcgtggtggtgtcgatggtagaacgaagcggcgtcgaagcctgtaaaacggcggtgcacaatcttctcgcgcaacgcgtcagtgggctgatcattaactatccgctggatgaccaggatgccattgctgtggaagctgcctgcactaatgttccggcgttatttcttgatgtctctgaccagacacccatcaacagtattattttctcccatgaagacggtacgcgactgggcgtggagcatctggtcgcattgggtcaccagcaaatcgcgctgttagcgggcccattaagttctgtctcggcgcgtctgcgtctggctggctggcataaatatctcactcgcaatcaaattcagccgatagcggaacgggaaggcgactggagtgccatgtccggttttcaacaaaccatgcaaatgctgaatgagggcatcgttcccactgcgatgctggttgccaacgatcagatggcgctgggcgcaatgcgcgccattaccgagtccgggctgcgcgttggtgcggatatctcggtagtgggatacgacgataccgaagacagctcatgttatatcccgccgttaaccaccatcaaacaggattttcgcctgctggggcaaaccagcgtggaccgcttgctgcaactctctcagggccaggcggtgaagggcaatcagctgttgcccgtctcactggtgaaaagaaaaaccaccctggcgcccaatacgcaaaccgcctctccccgcgcgttggccgattcattaatgcagctggcacgacaggtttcccgactggaaagcgggcagtgagcgcaacgcaattaatgtgagttaggatcgctaccttaagagagacgcgttatcgggggttagttcgtcatcattgatgagggttgattatcacagtttattactctgaattggctatccgcgtgtgtacctctacctggagtttttcccacggtggatatttcttcttgcgctgagcgtaagagctatctgacagaacagttcttctttgcttcctcgccagttcgctcgctatgctcggttacacggctgcggcgagcgctagtgataataagtgactgaggtatgtgctcttcttatctccttttgtagtgttgctcttattttaaacaactttgcggttttttgatgactttgcgattttgttgttgctttgcagtaaattgcaagatttaataaaaaaacgcaaagcaatgattaaaggatgttcagaatgaaactcatggaaacacttaaccagtgcataaacgctggtcatgaaatgacgaaggctatcgccattgcacagtttaatgatgacagcccggaagcgaggaaaataacccggcgctggagaataggtgaagcagcggatttagttggggtttcttctcaggctatcagagatgccgagaaagcagggcgactaccgcacccggatatggaaattcgaggacgggttgagcaacgtgttggttatacaattgaacaaattaatcatatgcgtgatgtgtttggtacgcgattgcgacgtgctgaagacgtatttccaccggtgatcggggttgctgcccataaaggtggcgtttacaaaacctcagtttctgttcatcttgctcaggatctggctctgaaggggctacgtgttttgctcgtggaaggtaacgacccccagggaacagcctcaatgtatcacggatgggtaccagatcttcatattcatgcagaagacactctcctgcctttctatcttggggaaaaggacgatgtcacttatgcaataaagcccacttgctggccggggcttgacattattccttcctgtctggctctgcaccgtattgaaactgagttaatgggcaaatttgatgaaggtaaactgcccaccgatccacacctgatgctccgactggccattgaaactgttgctcatgactatgatgtcatagttattgacagcgcgcctaacctgggtatcggcacgattaatgtcgtatgtgctgctgatgtgctgattgttcccacgcctgctgagttgtttgactacacctccgcactgcagtttttcgatatgcttcgtgatctgctcaagaacgttgatcttaaagggttcgagcctgatgtacgtattttgcttaccaaatacagcaatagtaatggctctcagtccccgtggatggaggagcaaattcgggatgcctggggaagcatggttctaaaaaatgttgtacgtgaaacggatgaagttggtaaaggtcagatccggatgagaactgtttttgaacaggccattgatcaacgctcttcaactggtgcctggagaaatgctctttctatttgggaacctgtctgcaatgaaattttcgatcgtctgattaaaccacgctgggagattagataatgaagcgtgcgcctgttattccaaaacatacgctcaatactcaaccggttgaagatacttcgttatcgacaccagctgccccgatggtggattcgttaattgcgcgcgtaggagtaatggctcgcggtaatgccattactttgcctgtatgtggtcgggatgtgaagtttactcttgaagtgctccggggtgatagtgttgagaagacctctcgggtatggtcaggtaatgaacgtgaccaggagctgcttactgaggacgcactggatgatctcatcccttcttttctactgactggtcaacagacaccggcgttcggtcgaagagtatctggtgtcatagaaattgccgatgggagtcgccgtcgtaaagctgctgcacttaccgaaagtgattatcgtgttctggttggcgagctggatgatgagcagatggctgcattatccagattgggtaacgattatcgcccaacaagtgcttatgaacgtggtcagcgttatgcaagccgattgcagaatgaatttgctggaaatatttctgcgctggctgatgcggaaaatatttcacgtaagattattacccgctgtatcaacaccgccaaattgcctaaatcagttgttgctcttttttctcaccccggtgaactatctgcccggtcaggtgatgcacttcaaaaagcctttacagataaagaggaattacttaagcagcaggcatctaaccttcatgagcagaaaaaagctggggtgatatttgaagctgaagaagttatcactcttttaacttctgtgcttaaaacgtcatctgcatcaagaactagtttaagctcacgacatcagtttgctcctggagcgacagtattgtataagggcgataaaatggtgcttaacctggacaggtctcgtgttccaactgagtgtatagagaaaattgaggccattcttaaggaacttgaaaagccagcaccctgatgcgaccacgttttagtctacgtttatctgtctttacttaatgtcctttgttacaggccagaaagcataactggcctgaatattctctctgggcccactgttccacttgtatcgtcggtctgataatcagactgggaccacggtcccactcgtatcgtcggtctgattattagtctgggaccacggtcccactcgtatcgtcggtctgattattagtctgggaccacggtcccactcgtatcgtcggtctgataatcagactgggaccacggtcccactcgtatcgtcggtctgattattagtctgggaccatggtcccactcgtatcgtcggtctgattattagtctgggaccacggtcccactcgtatcgtcggtctgattattagtctggaaccacggtcccactcgtatcgtcggtctgattattagtctgggaccacggtcccactcgtatcgtcggtctgattattagtctgggaccacgatcccactcgtgttgtcggtctgattatcggtctgggaccacggtcccacttgtattgtcgatcagactatcagcgtgagactacgattccatcaatgcctgtcaagggcaagtattgacatgtcgtcgtaacctgtagaacggagtaacctcggtgtgcggttgtatgcctgctgtggattgctgctgtgtcctgcttatccacaacattttgcgcacggttatgtggacaaaatacctggttacccaggccgtgccggcacgttaaccgggctgcatccgatgcaagtgtgtcgctgtcgacgagctcgcgagctcggacatgaggttgccccgtattcagtgtcgctgatttgtattgtctgaagttgtttttacgttaagttgatgcagatcaattaatacgatacctgcgtcataattgattatttgacgtggtttgatggcctccacgcacgttgtgatatgtagatgataatcattatcactttacgggtcctttccggtgatccgacaggttacggggcggcgacctcgcgggttttcgctatttatgaaaattttccggtttaaggcgtttccgttcttcttcgtcataacttaatgtttttatttaaaataccctctgaaaagaaaggaaacgacaggtgctgaaagcgagctttttggcctctgtcgtttcctttctctgtttttgtccgtggaatgaacaatggaagtccgagctcatcgctaataacttcgtatagcatacattatacgaagttatattcgat

SEQ ID NO: 163 - DNA, 31056 bp, synthetic construct
  misc_feature 1..31056: note = seed plasmid 4
  source 1..31056: mol_type = other DNA
gcggccgcttggccactccctctatgcgcactcgctcgctcggtggggcctggcgaccaaaggtcgccagacggacgtgctttgcacgtccggccccaccgagcgagcgagtgcgcatagagggagtggccaactccatcactagaggtatggcggccttgatggccaattcgattcgattagggcctacttggcctaatagtaatcaattacggggtcattagttcatagcccatatatggagttccgcgttacataacttacggtaaatggcccgcctggctgaccgcccaacgacccccgcccattgacgtcaataatgacgtatgttcccatagtaacgccaatagggactttccattgacgtcaatgggtggagtatttacggtaaactgcccacttggcagtacatcaagtgtatcatatgccaagtacgccccctattgacgtcaatgacggtaaatggcccgcctggcattatgcccagtacatgaccttatgggactttcctacttggcagtacatctacgtattagtcatcgctattaccatggtgatgcggttttggcagtacatcaatgggcgtggatagcggtttgactcacggggatttccaagtctccaccccattgacgtcaatgggagtttgttttggcaccaaaatcaacgggactttccaaaatgtcgtaacaactccgccccattgacgcaaatgggcggtaggcgtgtacggtgggaggtctatataagcagagctggtttagtgaaccgtcagatgccaccatggtgagcaagggcgaggagctgttcaccggggtggtgcccatcctggtcgagctggacggcgacgtaaacggccacaagttcagcgtgtccggcgagggcgagggcgatgccacctacggcaagctgaccctgaagttcatctgcaccaccggcaagctgcccgtgccctggcccaccctcgtgaccaccctgacctacggcgtgcagtgcttcagccgctaccccgaccacatgaagcagcacgacttcttcaagtccgccatgcccgaaggctacgtccaggagcgcaccatcttcttcaaggacgacggcaactacaagacccgcgccgaggtgaagttcgagggcgacaccctggtgaaccgcatcgagctgaagggcatcgacttcaaggaggacggcaacatcctggggcacaagctggagtacaactacaacagccacaacgtctatatcatggccgacaagcagaagaacggcatcaaggtgaacttcaagatccgccacaacatcgaggacggcagcgtgcagctcgccgaccactaccagcagaacacccccatcggcgacggccccgtgctgctgcccgacaaccactacctgagcacccagtccgccctgagcaaagaccccaacgagaagcgcgatcacatggtcctgctggagttcgtgaccgccgccgggatcactctcggcatggacgagctgtacaagtaagggtggcatccctgtgacccctccccagtgcctctcctggccctggaagttgccactccagtgcccaccagccttgtcctaataaaattaagttgcatcattttgtctgactaggtgtccttctataatattatggggtggaggggggtggtatggagcaaggggcaagttgggaagacaacctgtagggcctgcggggtctattgggaaccaagctggagtgcagtggcacaatcttggctcactgcaatctccgcctcctgggttcaagcgattctcctgcctcagcctcccgagttgttgggattccaggcatgcatgaccaggctcagctaatttttgtttttttggtagagacggggtttcaccatattggccaggctggtctccaactcctaatctcaggtgatctacccaccttggcctcccaaattgctgggattacaggcgtgaaccactgctcccttccctgtccttgccatacctctagtgatggagttggccactccctctatgcgcactcgctcgctcggtggggcctggcgaccaaaggtcgccagacggacgtgctttgcacgtccggccccaccgagcgagcgagtgcgcatagagggagtggccaaggcctgattggccgtagatgtacctggacatccaggtgatgccggcggcggtggtggaggcgcgcggaaagtcgcggacgcggttccagatgttgcgcagcggcaaaaagtgctccatggtcgggacgctctggccggtcaggcgcgcgcaatcgttgacgctctagaccgtgcaaaaggagagcctgtaagcgggcactcttccgtggtctggtggataaattcgcaagggtatcatggcggacgaccggggttcgagccccgtatccggccgtccgccgtgatccatgcggttaccgcccgcgtgtcgaacccaggtgtgcgacgtcagacaacgggggagtgctccttttggcttccttccaggcgcggcggctgctgcgctagcttttttggccactggccgcgcgcagcgtaagcggttaggctggaaagcgaaagcattaagtggctcgctccctgtagccggagggttattttccaagggttgagtcgcgggacccccggttcgagtctcggaccggccggactgcggcgaacgggggtttgcctccccgtcatgcaagaccccgcttgcaaattcctccggaaacagggacgagccccttttttgcttttcccagatgcatccggtgctgcggcagatgcgcccccctcctcagcagcggcaagagcaagagcagcggcagacatgcagggcaccctcccctcctcctaccgcgtggtacccaactccatgctcaacagtccccaggtacagcccaccctgcgtcgcaaccaggaacagctctacagcttcctggagcgccactcgccctacttccgcagccacagtgcgcagattaggagcgccacttctttttgtcacttgaaaaacatgtaaaaataatgtactagagacactttcaataaaggcaaatgcttttatttgtacactctcgggtgattatttacccccacccttgccgtctgcgccgtttaaaaatcaaaggggttctgccgcgcatcgctatgcgccactggcagggacacgttgcgatactggtgtttagtgctccacttaaactcaggcacaaccatccgcggcagctcggtgaagttttcactccacaggctgcgcaccatcaccaacgcgtttagcaggtcgggcgccgatatcttgaagtcgcagttggggcctccgccctgcgcgcgcgagttgcgatacacagggttgcagcactggaacactatcagcgccgggtggtgcacgctggccagcacgctcttgtcggagatcagatccgcgtccaggtcctccgcgttgctcagggcgaacggagtcaactttggtagctgccttcccaaaaagggcgcgtgcccaggctttgagttgcactcgcaccgtagtggcatcaaaaggtgaccgtgcccggtctgggcgttaggatacagcgcctgcataaaagccttgatctgcttaaaagccacctgagcctttgcgccttcagagaagaacatgccgcaagacttgccggaaaactgattggcaggacaggccgcgtcgtgcacgcagcaccttgcgtcggtgttggagatctgcaccacatttcggccccaccggttcttcacgatcttggccttgctagactgctccttcagcgcgcgctgcccgttttcgctcgtcacatccatttcaatcacgtgctccttatttatcataatgcttccgtgtagacacttaagctcgccttcgatctcagcgcagcggtgcagccacaacgcgcagcccgtgggctcgtgatgcttgtaggtcacctctgcaaacgactgcaggtacgcctgcaggaatcgccccatcatcgtcacaaaggtcttgttgctggtgaaggtcagctgcaacccgcggtgctcctcgttcagccaggtcttgcatacggccgccagagcttccacttggtcaggcagtagtttgaagttcgcctttagatcgttatccacgtggtacttgtccatcagcgcgcgcgcagcctccatgcccttctcccacgcagacacgatcggcacactcagcgggttcatcaccgtaatttcactttccgcttcgctgggctcttcctcttcctcttgcgtccgcataccacgcgccactgggtcgtcttcattcagccgccgcactgtgcgcttacctcctttgccatgcttgattagcaccggtgggttgctgaaacccaccatttgtagcgccacatcttctctttcttcctcgctgtccacgattacctctggtgatggcgggcgctcgggcttgggagaagggcgcttctttttcttcttgggcgcaatggccaaatccgccgccgaggtcgatggccgcgggctgggtgtgcgcggcaccagcgcgtcttgtgatgagtcttcctcgtcctcggactcgatacgccgcctcatccgcttttttgggggcgcccggggaggcggcggcgacggggacggggacgacacgtcctccatggttgggggacgtcgcgccgcaccgcgtccgcgctcgggggtggtttcgcgctgctcctcttcccgactggccatttccttctcctataggcagaaaaagatcatggagtcagtcgagaagaaggacagcctaaccgccccctctgagttcgccaccaccgcctccaccgatgccgccaacgcgcctaccaccttccccgtcgaggcacccccgcttgaggaggaggaagtgattatcgagcaggacccaggttttgtaagcgaagacgacgaggaccgctcagtaccaacagaggataaaaagcaagaccaggacaacgcagaggcaaacgaggaacaagtcgggcggggggacgaaaggcatggcgactacctagatgtgggagacgacgtgctgttgaagcatctgcagcgccagtgcgccattatctgcgacgcgttgcaagagcgcagcgatgtgcccctcgccatagcggatgtcagccttgcctacgaacgccacctattctcaccgcgcgtaccccccaaacgccaagaaaacggcacatgcgagcccaacccgcgcctcaacttctaccccgtatttgccgtgccagaggtgcttgccacctatcacatctttttccaaaactgcaagatacccctatcctgccgtgccaaccgcagccgagcggacaagcagctggccttgcggcagggcgctgtcatacctgatatcgcctcgctcaacgaagtgccaaaaatctttgagggtcttggacgcgacgagaagcgcgcggcaaacgctctgcaacaggaaaacagcgaaaatgaaagtcactctggagtgttggtggaactcgagggtgacaacgcgcgcctagccgtactaaaacgcagcatcgaggtcacccactttgcctacccggcacttaacctaccccccaaggtcatgagcacagtcatgagtgagctgatcgtgcgccgtgcgcagcccctggagagggatgcaaatttgcaagaacaaacagaggagggcctacccgcagttggcgacgagcagctagcgcgctggcttcaaacgcgcgagcctgccgacttggaggagcgacgcaaactaatgatggccgcagtgctcgttaccgtggagcttgagtgcatgcagcggttctttgctgacccggagatgcagcgcaagctagaggaaacattgcactacacctttcgacagggctacgtacgccaggcctgcaagatctccaacgtggagctctgcaacctggtctcctaccttggaattttgcacgaaaaccgccttgggcaaaacgtgcttcattccacgctcaagggcgaggcgcgccgcgactacgtccgcgactgcgtttacttatttctatgctacacctggcagacggccatgggcgtttggcagcagtgcttggaggagtgcaacctcaaggagctgcagaaactgctaaagcaaaacttgaaggacctatggacggccttcaacgagcgctccgtggccgcgcacctggcggacatcattttccccgaacgcctgcttaaaaccctgcaacagggtctgccagacttcaccagtcaaagcatgttgcagaactttaggaactttatcctagagcgctcaggaatcttgcccgccacctgctgtgcacttcctagcgactttgtgcccattaagtaccgcgaatgccctccgccgctttggggccactgctaccttctgcagctagccaactaccttgcctaccactctgacataatggaagacgtgagcggtgacggtctactggagtgtcactgtcgctgcaacctatgcaccccgcaccgctccctggtttgcaattcgcagctgcttaacgaaagtcaaattatcggtacctttgagctgcagggtccctcgcctgacgaaaagtccgcggctccggggttgaaactcactccggggctgtggacgtcggcttaccttcgcaaatttgtacctgaggactaccacgcccacgagattaggttctacgaagaccaatcccgcccgccaaatgcggagcttaccgcctgcgtcattacccagggccacattcttggccaattgcaagccatcaacaaagcccgccaagagtttctgctacgaaagggacggggggtttacttggacccccagtccggcgaggagctcaacccaatccccccgccgccgcagccctatcagcagcagccgcgggcccttgcttcccaggatggcacccaaaaagaagctgcagctgccgccgccacccacggacgaggaggaatactgggacagtcaggcagaggaggttttggacgaggaggaggaggacatgatggaagactgggagagcctagacgaggaagcttccgaggtcgaagaggtgtcagacgaaacaccgtcaccctcggtcgcattcccctcgccggcgccccagaaatcggcaaccggttccagcatggctacaacctccgctcctcaggcgccgccggcactgcccgttcgccgacccaaccgtagatgggacaccactggaaccagggccggtaagtccaagcagccgccgccgttagcccaagagcaacaacagcgccaaggctaccgctcatggcgcgggcacaagaacgccatagttgcttgcttgcaagactgtgggggcaacatctccttcgcccgccgctttcttctctaccatcacggcgtggccttcccccgtaacatcctgcattactaccgtcatctctacagcccatactgcaccggcggcagcggcagcggcagcaacagcagcggccacacagaagcaaaggcgaccggatagcaagactctgacaaagcccaagaaatccacagcggcggcagcagcaggaggaggagcgctgcgtctggcgcccaacgaacccgtatcgacccgcgagcttagaaacaggatttttcccactctgtatgctatatttcaacagagcaggggccaagaacaagagctgaaaataaaaaacaggtctctgcgatccctcacccgcagctgcctgtatcacaaaagcgaagatcagcttcggcgcacgctggaagacgcggaggctctcttcagtaaatactgcgcgctgactcttaaggactagtttcgcgccctttctcaaatttaagcgcgaaaactacgtcatctccagcggccacacccggcgccagcacctgtcgtcagcgccattatgagcaaggaaattcccacgccctacatgtggagttaccagccacaaatgggacttgcggctggagctgcccaagactactcaacccgaataaactacatgagcgcgggaccccacatgatatcccgggtcaacggaatccgcgcccaccgaaaccgaattctcttggaacaggcggctattaccaccacacctcgtaataaccttaatccccgtagttggcccgctgccctggtgtaccaggaaagtcccgctcccaccactgtggtacttcccagagacgcccaggccgaagttcagatgactaactcaggggcgcagcttgcgggcggctttcgtcacagggtgcggtcgcccgggcactaaacggtacacaggaaacaggagacacaactccaagtgcatactctatgtcattttcatgggactggtctggccacaactacattaatgaaatatttgccacatcctcttacactttttcatacattgcccaagaataaagaatcgtttgtgttatgtttcaacgtgtttatttttcaattgcagaaaatttcaagtcatttttcattcagtagtatagccccaccaccacatagcttatacagatcaccgtaccttaatcaaactcacagaaccctagtattcaacctgccacctccctcccaacacacagagtacacagtcctttctccccggctggccttaaaaagcatcatatcatgggtaacagacatattcttaggtgttatattccacacggtttcctgtcgagccaaacgctcatcagtgatattaataaactccccgggcagctcacttaagttcatgtcgctgtccagctgctgagccacaggctgctgtccaacttgcggttgcttaacgggcggcgaaggagaagtccacgcctacatgggggtagagtcataatcgtgcatcaggatagggcggtggtgctgcagcagcgcgcgaataaactgctgccgccgccgctccgtcctgcaggaatacaacatggcagtggtctcctcagcgatgattcgcaccgcccgcagcataaggcgccttgtcctccgggcacagcagcgcaccctgatctcacttaaatcagcacagtaactgcagcacagcaccacaatattgttcaaaatcccacagtgcaaggcgctgtatccaaagctcatggcggggaccacagaacccacgtggccatcataccacaagcgcaggtagattaagtggcgacccctcataaacacgctggacataaacattacctcttttggcatgttgtaattcaccacctcccggtaccatataaacctctgattaaacatggcgccatccaccaccatcctaaaccagctggccaaaacctgcccgccggctatacactgcagggaaccgggactggaacaatgacagtggagagcccaggactcgtaaccatggatcatcatgctcgtcatgatatcaatgttggcacaacacaggcacacgtgcatacacttcctcaggattacaagctcctcccgcgttagaaccatatcccagggaacaacccattcctgaatcagcgtaaatcccacactgcagggaagacctcgcacgtaactcacgttgtgcattgtcaaagtgttacattcgggcagcagcggatgatcctccagtatggtagcgcgggtttctgtctcaaaaggaggtagacgatccctactgtacggagtgcgccgagacaaccgagatcgtgttggtcgtagtgtcatgccaaatggaacgccggacgtagtcatatttcctgaagcaaaaccaggtgcgggcgtgacaaacagatctgcgtctccggtctcgccgcttagatcgctctgtgtagtagttgtagtatatccactctctcaaagcatccaggcgccccctggcttcgggttctatgtaaactccttcatgcgccgctgccctgataacatccaccaccgcagaataagccacacccagccaacctacacattcgttctgcgagtcacacacgggaggagcgggaagagctggaagaaccatgtttttttttttattccaaaagattatccaaaacctcaaaatgaagatctattaagtgaacgcgctcccctccggtggcgtggtcaaactctacagccaaagaacagataatggcatttgtaagatgttgcacaatggcttccaaaaggcaaacggccctcacgtccaagtggacgtaaaggctaaacccttcagggtgaatctcctctataaacattccagcaccttcaaccatgcccaaataattctcatctcgccaccttctcaatatatctctaagcaaatcccgaatattaagtccggccattgtaaaaatctgctccagagcgccctccaccttcagcctcaagcagcgaatcatgattgcaaaaattcaggttcctcacagacctgtataagattcaaaagcggaacattaacaaaaataccgcgatcccgtaggtcccttcgcagggccagctgaacataatcgtgcaggtctgcacggaccagcgcggccacttccccgccaggaaccatgacaaaagaacccacactgattatgacacgcatactcggagctatgctaaccagcgtagccccgatgtaagcttgttgcatgggcggcgatataaaatgcaaggtgctgctcaaaaaatcaggcaaagcctcgcgcaaaaaagaaagcacatcgtagtcatgctcatgcagataaaggcaggtaagctccggaaccaccacagaaaaagacaccatttttctctcaaacatgtctgcgggtttctgcataaacacaaaataaaataacaaaaaaacatttaaacattagaagcctgtcttacaacaggaaaaacaacccttataagcataagacggactacggccatgccggcgtgaccgtaaaaaaactggtcaccgtgattaaaaagcaccaccgacagctcctcggtcatgtccggagtcataatgtaagactcggtaaacacatcaggttgattcacatcggtcagtgctaaaaagcgaccgaaatagcccgggggaatacatacccgcaggcgtagagacaacattacagcccccataggaggtataacaaaattaataggagagaaaaacacataaacacctgaaaaaccctcctgcctaggcaaaatagcaccctcccgctccagaacaacatacagcgcttccacagcggcagccataacagtcagccttaccagtaaaaaagaaaacctattaaaaaaacaccactcgacacggcaccagctcaatcagtcacagtgtaaaaaagggccaagtgcagagcgagtatatataggactaaaaaatgacgtaacggttaaagtccacaaaaaacacccagaaaaccgcacgcgaacctacgcccagaaacgaaagccaaaaaacccacaacttcctcaaatcgtcacttccgttttcccacgttacgtaacttcccattttaagaaaactacaattcccaacacatacaagttactccgccctaaaacggcctatgtggccagtgacgtaacgcgaagcgcgcgaagcgagaccacgcctaccagctgcgtcagcagtcaggtgacccttttgcgacagtttgcgacaccacgtggccgctgagggtatatattctcgagtgagcgaaccaggagctccattttgaccgcgaaatttgaacgagcagcagccatgccggggttctacgagattgtcctgaaggtcccgagtgacctggacgagcgcctgccgggcatttctaactcgtttgttaactgggtggccgagaaggaatgggacgtgccgccggattctgacatggatccgaatctgattgagcaggcacccctgaccgtggccgaaaagcttcagcgcgagttcctggtggagtggcgccgcgtgagtaaggctccggaggccctcttttttgtccagttcgaaaagggggagacctacttccacctgcacgtgctgattgagaccatcggggtcaaatccatggtggtcggccgctacgtgagccagattaaagagaagctggtgacccgcatctaccgcggggtcgagccgcagcttccgaactggttcgcggtgaccaaaacgcgaaatggcgccgggggcgggaacaaggtggtggacgactgctacatccccaactacctgctccccaagacccagcccgagctccagtgggcgtggactaacatggaccagtatttaagcgcctgtttgaatctcgcggagcgtaaacggctggtggcgcagcatctgacgcacgtgtcgcagacgcaggagcagaacaaagagaatcagaaccccaattctgacgcgccggtcatcaggtcaaaaacctcagccaggtacatggagctggtcgggtggctggtggaccgcgggatcacgtcagaaaagcaatggattcaggaggaccaggcctcgtacatctccttcaacgccgcctccaactcgcggtcccagatcaaggccgcgctggacaatgcctccaagatcatgagcctgacaaagacggctccggactacctggtgggcagcaacccgccggaggacattaccaaaaatcggatctaccaaatcctggagctgaacgggtacgatccgcagtacgcggcctccgtcttcctgggctgggcgcaaaagaagttcgggaagaggaacaccatctggctctttgggccggccacgacgggtaaaaccaacatcgcggaagccatcgcccacgccgtgcccttctacggctgcgtaaactggaccaatgagaactttcccttcaacgattgcgtcgacaagatggtgatctggtgggaggagggcaagatgacggccaaggtcgtggagagcgccaaggccattctgggcggaagcaaggtgcgcgtggaccaaaagtgcaagtcatcggcccagatcgaacccactcccgtgatcgtcacctccaacaccaacatgtgcgccgtgattgacgggaacagcaccaccttcgagcatcagcagccgctgcaggaccggatgtttgaatttgaacttacccgccgtttggaccatgactttgggaaggtcaccaaacaggaagtaaaggactttttccggtgggcttccgatcacgtgactgacgtggctcatgagttctacgtcagaaagggtggagctaagaaacgccccgcctccaatgacgcggatgtaagcgagccaaaacgggagtgcacgtcacttgcgcagccgacaacgtcagacgcggaagcaccggcggactacgcggacaggtaccaaaacaaatgttctcgtcacgtgggcatgaatctgatgctttttccctgtaaaacatgcgagagaatgaatcaaatttccaatgtctgttttacgcatggtcaaagagactgtggggaatgcttccctggaatgtcagaatctcaacccgtttctgtcgtcaaaaagaagacttatcagaaactgtgtccaattcatcatatcctgggaagggcacccgagattgcctgttcggcctgcgatttggccaatgtggacttggatgactgtgtttctgagcaataaatgacttaaaccaggtggcctctatggccatggctgccgatggttatcttccagattggctcgaggacactctctctgaaggaataagacagtggtggaagctcaaacctggcccaccaccaccaaagcccgcagagcggcataaggacgacagcaggggtcttgtgcttcctgggtacaagtacctcggacccttcaacggactcgacaagggagagccggtcaacgaggcagacgccgcggccctcgagcacgacaaagcctacgaccggcagctcgacagcggagacaacccgtacctcaagtacaaccacgccgacgcggagtttcaggagcgccttaaagaagatacgtcttttgggggcaacctcggacgagcagtcttccaggcgaaaaagagggttcttgaacctctgggcctggttgaggaacctgttaagacggctccgggaaaaaagaggccggtagagcactctcctgtggagccagactcctcctcgggaaccggaaaggcgggccagcagcctgcaagaaaaagattgaattttggtcagactggagacgcagactcagtacctgacccccagcctctcggacagccaccagcagccccctctggtctgggaactaatacgatggctacaggcagtggcgcaccaatggcagacaataacgagggcgccgacggagtgggtaattcctcgggaaattggcattgcgattccacatggatgggcgacagagtcatcaccaccagcacccgaacctgggccctgcccacctacaacaaccacctctacaaacaaatttccagccaatcaggagcctcgaacgacaatcactactttggctacagcaccccttgggggtattttgacttcaacagattccactgccacttttcaccacgtgactggcaaagactcatcaacaacaactggggattccgacccaagagactcaacttcaagctctttaacattcaagtcaaagaggtcacgcagaatgacggtacgacgacgattgccaataaccttaccagcacggttcaggtgtttactgactcggagtaccagctcccgtacgtcctcggctcggcgcatcaaggatgcctcccgccgttcccagcagacgtcttcatggtgccacagtatggatacctcaccctgaacaacgggagtcaggcagtaggacgctcttcattttactgcctggagtactttccttctcagatgctgcgtaccggaaacaactttaccttcagctacacttttgaggacgttcctttccacagcagctacgctcacagccagagtctggaccgtctcatgaatcctctcatcgaccagtacctgtattacttgagcagaacaaacactccaagtggaaccaccacgcagtcaaggcttcagttttctcaggccggagcgagtgacattcgggaccagtctaggaactggcttcctggaccctgttaccgccagcagcgagtatcaaagacatctgcggataacaacaacagtgaatactcgtggactggagctaccaagtaccacctcaatggcagagactctctggtgaatccgggcccggccatggcaagccacaaggacgatgaagaaaagttttttcctcagagcggggttctcatctttgggaagcaaggctcagagaaaacaaatgtggacattgaaaaggtcatgattacagacgaagaggaaatcaggacaaccaatcccgtggctacggagcagtatggttctgtatctaccaacctccagagaggcaacagacaagcagctaccgcagatgtcaacacacaaggcgttcttccaggcatggtctggcaggacagagatgtgtaccttcaggggcccatctgggcaaagattccacacacggacggacattttcacccctctcccctcatgggtggattcggacttaaacaccctcctccacagattctcatcaagaacaccccggtacctgcgaatccttcgaccaccttcagtgcggcaaagtttgcttccttcatcacacagtactccacgggacaggtcagcgtggagatcgagtgggagctgcagaaggaaaacagcaaacgctggaatcccgaaattcagtacacttccaactacaacaagtctgttaatgtggactttactgtggacactaatggcgtgtattcagagcctcgccccattggcaccagatacctgactcgtaatctgttgcttgttaatcaataaaccgtttaattcgtttcagttgaactttggtctctgcgtatttctttcttatctagtttccatggctacgtagataagtagcatggcgggttaatcattaactacagcccgggcgtttaaacagcgggcggaggggtggagtcgtgacgtgaattacgtcatagggttagggaggtcctgtattagaggtcacgtgagtgttttgcgacattttgcgacaccatgtggtctcgctgggggggggggcccgagtgagcacgcagggtctccattttgaagcgggaggtttgaacgcggccgcaaaaggccttcttggccaccccgggccgtcgaccaattctcatgtttgacagcttatcatcgaatttctgccattcatccgcttattatcacttattcaggcgtagcaaccaggcgtttaagggcaccaataactgccttaaaaaaattacgccccgccctgccactcatcgcagtactgttgtaattcattaagcattctgccgacatggaagccatcacaaacggcatgatgaacctgaatcgccagcggcatcagcaccttgtcgccttgcgtataatatttgcccatggtgaaaacgggggcgaagaagttgtccatattggccacgtttaaatcaaaactggtgaaactcacccagggattggctgagacgaaaaacatattctcaataaaccctttagggaaataggccaggttttcaccgtaacacgccacatcttgcgaatatatgtgtagaaactgccggaaatcgtcgtggtattcactccagagcgatgaaaacgtttcagtttgctcatggaaaacggtgtaacaagggtgaacactatcccatatcaccagctcaccgtctttcattgccatacggaattccggatgagcattcatcaggcgggcaagaatgtgaataaaggccggataaaacttgtgcttatttttctttacggtctttaaaaaggccgtaatatccagctgaacggtctggttataggtacattgagcaactgactgaaatgcctcaaaatgttctttacgatgccattgggatatatcaacggtggtatatccagtgatttttttctccattttagcttccttagctcctgaaaatctcgataactcaaaaaatacgcccggtagtgatcttatttcattatggtgaaagttggaacctcttacgtgccgatcaacgtctcattttcgccaaaagttggcccagggcttcccggtatcaacagggacaccaggatttatttattctgcgaagtgatcttccgtcacaggtatttattcgcgataagctcatggagcggcgtaaccgtcgcacaggaaggacagagaaagcgcggatctgggaagtgacggacagaacggtcaggacctggattggggaggcggttgccgccgctgctgctgacggtgtgacgttctctgttccggtcacaccacatacgttccgccattcctatgcgatgcacatgctgtatgccggtataccgctgaaagttctgcaaagcctgatgggacataagtccatcagttcaacggaagtctacacgaaggtttttgcgctggatgtggctgcccggcaccgggtgcagtttgcgatgccggagtctgatgcggttgcgatgctgaaacaattatcctgagaataaatgccttggcctttatatggaaatgtggaactgagtggatatgctgtttttgtctgttaaacagagaagctggctgttatccactgagaagcgaacgaaacagtcgggaaaatctcccattatcgtagagatccgcattattaatctcaggagcctgtgtagcgtttataggaagtagtgttctgtcatgatgcctgcaagcggtaacgaaaacgatttgaatatgccttcaggaacaatagaaatcttcgtgcggtgttacgttgaagtggagcggattatgtcagcaatggacagaacaacctaatgaacacagaaccatgatgtggtctgtccttttacagccagtagtgctcgccgcagtcgagcgacagggcgaagccctcgagtgagcgaggaagcaccagggaacagcacttatatattctgcttacacacgatgcctgaaaaaacttcccttggggttatccacttatccacggggatatttttataattattttttttatagtttttagatcttcttttttagagcgccttgtaggcctttatccatgctggttctagagaaggtgttgtgacaaattgccctttcagtgtgacaaatcaccctcaaatgacagtcctgtctgtgacaaattgcccttaaccctgtgacaaattgccctcagaagaagctgttttttcacaaagttatccctgcttattgactcttttttatttagtgtgacaatctaaaaacttgtcacacttcacatggatctgtcatggcggaaacagcggttatcaatcacaagaaacgtaaaaatagcccgcgaatcgtccagtcaaacgacctcactgaggcggcatatagtctctcccgggatcaaaaacgtatgctgtatctgttcgttgaccagatcagaaaatctgatggcaccctacaggaacatgacggtatctgcgagatccatgttgctaaatatgctgaaatattcggattgacctctgcggaagccagtaaggatatacggcaggcattgaagagtttcgcggggaaggaagtggttttttatcgccctgaagaggatgccggcgatgaaaaaggctatgaatcttttccttggtttatcaaacgtgcgcacagtccatccagagggctttacagtgtacatatcaacccatatctcattcccttctttatcgggttacagaaccggtttacgcagtttcggcttagtgaaacaaaagaaatcaccaatccgtatgccatgcgtttatacgaatccctgtgtcagtatcgtaagccggatggctcaggcatcgtctctctgaaaatcgactggatcatagagcgttaccagctgcctcaaagttaccagcgtatgcctgacttccgccgccgcttcctgcaggtctgtgttaatgagatcaacagcagaactccaatgcgcctctcatacattgagaaaaagaaaggccgccagacgactcatatcgtattttccttccgcgatatcacttccatgacgacaggatagtctgagggttatctgtcacagatttgagggtggttcgtcacatttgttctgacctactgagggtaatttgtcacagttttgctgtttccttcagcctgcatggattttctcatactttttgaactgtaatttttaaggaagccaaatttgagggcagtttgtcacagttgatttccttctctttcccttcgtcatgtgacctgatacgcgtgctaccttaagagagtcaattcgcccttcccggtcgatatgaacagcttatttacataattcacgttattggtagttataaatgaaattcctaatatcggttatgaagtgaaattgaatttctacttgatctttctctctatttttgtaaaataaaattaagaatatttaaatattcaatgattcatttttgcagaaatcggaggaagaagaatatatgaaaacatttaacatttctcaacaagatccccccatattgttgtataagtgatgaaatactgaatttaaaacttagtttatatgtggtaaaatgttttaatcaagtttaggaggaattaattatgaagtgtaatgaataatgaatgtaacagggttcaattaaaagagggaagcgtatcattaaccctataaactacgtctgccctcattattggagggtgaaatgtgaatacatcctattcacaatcgaatttacgacacaaccaaattttaatttggctttgcattttatctttttttagcgtattaaatgaaatggttttgaacgtctcattacctgatattgcaaatgattttaataaaccaccagcgagtacaaactgggtgaacacagcctttatgttaaccttttccattggaacagctgtatatggaaagctatctgatcaattaggcatcaaaaggttactcctatttggaattataataaattgtttcgggtcggtaattgggtttgttggccattctttcttttccttacttattatggctcgttttattcaaggggctggtgcagctgcatttccagcactcgtaatggttgtagttgcgcgctatattccaaaggaaaataggggtaaagcatttggtcttattggatcgatagtagccatgggagaaggagtcggtccagcgattggtggaatgatagcccattatattcattggtcctatcttctactcattcctatgataacaattatcactgttccgtttcttatgaaattattaaagaaagaagtaaggataaaaggtcattttgatatcaaaggaattatactaatgtctgtaggcattgtattttttatgttgtttacaacatcatatagcatttcttttcttatcgttagcgtgctgtcattcctgatatttgtaaaacatatcaggaaagtaacagatccttttgttgatcccggattagggaaaaatataccttttatgattggagttctttgtgggggaattatatttggaacagtagcagggtttgtctctatggttccttatatgatgaaagatgttcaccagctaagtactgccgaaatcggaagtgtaattattttccctggaacaatgagtgtcattattttcggctacattggtgggatacttgttgatagaagaggtcctttatacgtgttaaacatcggagttacatttctttctgttagctttttaactgcttcctttcttttagaaacaacatcatggttcatgacaattataatcgtatttgttttaggtgggctttcgttcaccaaaacagttatatcaacaattgtttcaagtagcttgaaacagcaggaagctggtgctggaatgagtttgcttaactttaccagctttttatcagagggaacaggtattgcaattgtaggtggtttattatccatacccttacttgatcaaaggttgttacctatggaagttgatcagtcaacttatctgtatagtaatttgttattacttttttcaggaatcattgtcattagttggctggttaccttgaatgtatataaacattctcaaagggatttctaaatcgttaagggatcaactttgggagagagttcaaaattgatcctttttttataacaggaattgggcatcaaataaaacgaaaggctcagtcgaaagactgggcctttcgttttatctgttgtttgtcggtgaacgctctcctgagtaggacaaatccgccgggagcggatttgaacgttgcgaagcaacggcccggagggtggcgggcaggacgcccgccataaactgccaggcatcaaattaagcagaaggccatcctgacggatggcctttttgcgtttctacaaactcttcctgtcgtcatatctacaattctacacagcccagtccagactattcggcactgaaattatgggtgaagtggtcaagacctcactaggcaccttaaaaatagcgcaccctgaagaagatttatttgaggtagcccttgcctacctagcttccaagaaagatatcctaacagcacaagagcggaaagatgttttgttctacatccagaacaacctctgctaaaattcctgaaaaattttgcaaaaagttgttgactttatctacaaggtgtggcataatgtgtggaattgtgagcggataacaattaagctaattctatggtaaaagcattcctgaacccaatatccttatttttagtggacaaggccttgttctcatatggttgcttgagccagtgccttacaaggctcttccgctttggcaggctgttcaaaattatttattagagcaactcaaggaactaggcggagatccaaaagcaaccgatgcagcacgtgtttttcggattgctgggagcgtcaatagtaagaatggagcggaagtaagagcggaatatcggcacgattacagatatgagttaaggcagattcaatttgattaccttccagaactcaatgaggttattaatcccgctccacaaaagaaaaaacgggggcgtaaaaagaaagtagttcagttattcaatacctacaaactccattacgctcgcctattggatatagtgaaattggtggaactacgaaattatgaggtaactggatacagggaaatcatttgctttttataccgttattggttgtgctgttacacgaacgaccctgtagaggctttaaatcaaacacagacacttaatttacagttcactgagcctttacccttaaaagaggttgaaagggctacacggagcgcagaaaaggcgtgggaagcacgaaataacgaagaggctaaccggattgcaatcgaaaaaggatatcccagtgctggatacaatattagcaataaaaagttgattgaatggctagatatcacaccagaagaacagaagcatttacagacgattatagacgctaatgagaaacggagaagaaagcgggaaagggataggatttatcaagaacaaaaacgtcgtgagcggggagatatgacccgacaggagtatattaagcaacaacaggataaaacagatgataaattatttaaattgcaggagttattagaacagaatcccaaaatctcaaaaattaaattagcaaaaatacttggtgtagataaatcgcacttatacagactgctgaaacaactataactggaaaaaattagtgtctcatggttcgtcgcccttatattatgggcgttagcctgcttgctaattggataggtgttattgtcatttcaacgtcggacgttttggtagatgaacgtcggacgttatttgcttcaatagattgttgatgtattaagggttgcagtgaatcgacaagcaaaaagttatgacgttgtgaaaaaattgaatagaaaattggaaattacgtcggacgttctaacttaaaaaccctgttatatcaatgatttaaaaggaaattaacgtcataaaagacctttctgcaacaaaagtttttctggaagagttgaggttattttataggtattatggacttttgtagactttttgtgtactttttgtggactccacactcgctggtatcgtgttattttttaattgagatatgaatatggaaattaaacgttttaggcgttggtttggtgatgacaaaaaaataagagtacccgctcacaacggatactctttcgagaaatgtacgaaacgctataaataaaaaataactagatacatttacattgtatcacgtttcgtacatttctccaataacaaattgattggaggaatgcaaagtgaataatgaaccagtaaaacgtggtaagaagaacagatgggaattaaacctacctataatgacttatgtagtagctgatgattggattgataaactaggacacgaaacgtttactttatggttgaggttccatacttgggtagatagagaagatgaactccgagattatgatcgcatacctagaagttttgagaacatatataaaaagacactaggaatctcaaaaagtaagttttatagattgataaaacctttatgggaatatggattaatagacatcatagaatacgaagaatctaaccgtaattctactaaacctaaaaatataattgtttatgagtatcctttacacgaaatagaaagaaagtataaaccactagaaaaattaagagattgggataaagactataattccgtttctaaagaattaggtaaaacaggtggtagaccaaggaaaaaagatagtgaagaagaacccgaaaagaaacccgaagaagtaactaaaaagaaacgtaaatataagttaaaaagagttatccacaacggtttcaaaaatgaaacggtggagggtttcaaaaatgaaacggtggagggtttcaaaaatgaaacggtgaccgtttcaaaaataaaacccaataattattcaaatatctttaataacttatcaaatatttctactaatgtttcaaataatttattaattgatgatgatgaggaaatcgaaaatgaaccaactggtcgtacaataaataggtcattacttttttcacaagaagatattaaacaggcctatcaatttattaatagattttcagttatacagttacgtgaaaactttagctttgataaacactttgaagaacggttggtatgttatttatggaaagcagggatttctactttttacacgcacgaaatcagtaaaatgataaaaaaaatagcagactatgaaaaatctaaaaaaggtagattaaacccaatacgtgaccgagccttatatatggtaaatggtcttgtaatgaatagagcttcttcccaaagtgaacatgctacttataaactaaaccaatataaaaaacagaaggaacaggaaaaacaacaacaggagcaacaaagatcaagagtaccgttctataattggttggaggaaagagaagaacaaaccgaaggtcaactacccaccacttaaagcctaacggcttttgaagtggggcttgtaaaaagccctagttgactaccccaagtctttcgaggactacgttggaaaggtcatgacacctacaaatgctcctctagttcgtagccactgtcgttgatggttaaaagtcctgatgggtagggacggtgctgtcaacatcacaagcccttccaacatgggggaagaggaagaacactccgagaaaggagggggctgtcgtacacgccttgttcgtgtacgtgatttttaacacttttatctctaatataatctctccttgagttagcagagactaagaataaaacacattaggattttttatctacataaggaggttcaatacatgcctactatttcgtttaagggaaagtcttttgtacaaaatcatcacttgactgtaaaatatcatgaattgatcccagaaccagaaaaaagtctgaccgataaagttagtcttcatgacaatcttatcattcatggggacaatttaaaggcgttgaaagctctactacctacatatgctggtaagatagattgcatctatattgacccaccatacaatactggaactgaaaaatggatttataatgataatgtcaactccccaatgattagggaatggcttggaaaagtggtagacaaagaagacttatcccgacatgataagtggctttgtatgatgatgccgaggttaaaactgttgaaagagttgttgtcagaagacggagtgatatttgtaagcattgactacaatgaaatacaccatcttacgtgccttatgaacgaaatattcggtgaggagaattttcgtgacgctattatcattcgtagaggagtaaaaaatgttcaagcgcaatttgacacaattgattctctttcaaatggttatgagtctattttggtttacactaaacagccatctcgacgatttaataaggtttatgaagatgtagaagaaaagcctggtagttggaataatcattggagaggtacagaccgtaaaactatgagatatgaattatttggggttactccgacagaaggtcaatggagatgggggaaagaacgtagtctccaggctattgaaaactatcaaatgatgttagatgaacttagacaaaaaggcattactaatccaactcaagaggatattgataaatggtatcttgaatatgtagaaaataatggggaagatattgacttgttacgacaaaatgataatggcacgattgagcactttgttccaccgactagcaaaaagttgttaagtaatgcctggtttgacttaaaacccaacggttctagtcaattaaagaagatatttggaaggaaggttttcgataaccctaaatcaattgatttggtaaaaagactaatacaatttgcgactgaaaacaaagaagcgattgtacttgactcatttgcagggagtggcactactgctcatgcagtattatcgcttaacaaacaagatggagggaatcgtcgtttcatccttattgagatggaagaatatgcacatgagattaccgcagaacgcggatctttatcgatttgcatgcaagctaattcggtggaaacgaggtcatcatttccttccgaaaaaacggttgcatttaaatcttacatatgtaatactttcaaagactacatttgtaagatttgatgtttgagtcggctgaaagatcgtacgtaccaattattgtttcgtgattgttcaagccataacactgtagggatagtggaaagagtgcttcatctggttacgatcaatcaaatattcaaacggagggagacgattttgatgaaaccagtaacgttatacgatgtcgcagagtatgccggtgtctcttatcagaccgtttcccgcgtggtgaaccaggccagccacgtttctgcgaaaacgcgggaaaaagtggaagcggcgatggcggagctgaattacattcccaaccgcgtggcacaacaactggcgggcaaacagtcgttgctgattggcgttgccacctccagtctggccctgcacgcgccgtcgcaaattgtcgcggcgattaaatctcgcgccgatcaactgggtgccagcgtggtggtgtcgatggtagaacgaagcggcgtcgaagcctgtaaaacggcggtgcacaatcttctcgcgcaacgcgtcagtgggctgatcattaactatccgctggatgaccaggatgccattgctgtggaagctgcctgcactaatgttccggcgttatttcttgatgtctctgaccagacacccatcaacagtattattttctcccatgaagacggtacgcgactgggcgtggagcatctggtcgcattgggtcaccagcaaatcgcgctgttagcgggcccattaagttctgtctcggcgcgtctgcgtctggctggctggcataaatatctcactcgcaatcaaattcagccgatagcggaacgggaaggcgactggagtgccatgtccggttttcaacaaaccatgcaaatgctgaatgagggcatcgttcccactgcgatgctggttgccaacgatcagatggcgctgggcgcaatgcgcgccattaccgagtccgggctgcgcgttggtgcggatatctcggtagtgggatacgacgataccgaagacagctcatgttatatcccgccgttaaccaccatcaaacaggattttcgcctgctggggcaaaccagcgtggaccgcttgctgcaactctctcagggccaggcggtgaagggcaatcagctgttgcccgtctcactggtgaaaagaaaaaccaccctggcgcccaatacgcaaaccgcctctccccgcgcgttggccgattcattaatgcagctggcacgacaggtttcccgactggaaagcgggcagtgagcgcaacgcaattaatgtgagttaggatcgctaccttaagagagacgcgttatcgggggttagttcgtcatcattgatgagggttgattatcacagtttattactctgaattggctatccgcgtgtgtacctctacctggagtttttcccacggtggatatttcttcttgcgctgagcgtaagagctatctgacagaacagttcttctttgcttcctcgccagttcgctcgctatgctcggttacacggctgcggcgagcgctagtgataataagtgactgaggtatgtgctcttcttatctccttttgtagtgttgctcttattttaaacaactttgcggttttttgatgactttgcgattttgttgttgctttgcagtaaattgcaagatttaataaaaaaacgcaaagcaatgattaaaggatgttcagaatgaaactcatggaaacacttaaccagtgcataaacgctggtcatgaaatgacgaaggctatcgccattgcacagtttaatgatgacagcccggaagcgaggaaaataacccggcgctggagaataggtgaagcagcggatttagttggggtttcttctcaggctatcagagatgccgagaaagcagggcgactaccgcacccggatatggaaattcgaggacgggttgagcaacgtgttggttatacaattgaacaaattaatcatatgcgtgatgtgtttggtacgcgattgcgacgtgctgaagacgtatttccaccggtgatcggggttgctgcccataaaggtggcgtttacaaaacctcagtttctgttcatcttgctcaggatctggctctgaaggggctacgtgttttgctcgtggaaggtaacgacccccagggaacagcctcaatgtatcacggatgggtaccagatcttcatattcatgcagaagacactctcctgcctttctatcttggggaaaaggacgatgtcacttatgcaataaagcccacttgctggccggggcttgacattattccttcctgtctggctctgcaccgtattgaaactgagttaatgggcaaatttgatgaaggtaaactgcccaccgatccacacctgatgctccgactggccattgaaactgttgctcatgactatgatgtcatagttattgacagcgcgcctaacctgggtatcggcacgattaatgtcgtatgtgctgctgatgtgctgattgttcccacgcctgctgagttgtttgactacacctccgcactgcagtttttcgatatgcttcgtgatctgctcaagaacgttgatcttaaagggttcgagcctgatgtacgtattttgcttaccaaatacagcaatagtaatggctctcagtccccgtggatggaggagcaaattcgggatgcctggggaagcatggttctaaaaaatgttgtacgtgaaacggatgaagttggtaaaggtcagatccggatgagaactgtttttgaacaggccattgatcaacgctcttcaactggtgcctggagaaatgctctttctatttgggaacctgtctgcaatgaaattttcgatcgtctgattaaaccacgctgggagattagataatgaagcgtgcgcctgttattccaaaacatacgctcaatactcaaccggttgaagatacttcgttatcgacaccagctgccccgatggtggattcgttaattgcgcgcgtaggagtaatggctcgcggtaatgccattactttgcctgtatgtggtcgggatgtgaagtttactcttgaagtgctccggggtgatagtgttgagaagacctctcgggtatggtcaggtaatgaacgtgaccaggagctgcttactgaggacgcactggatgatctcatcccttcttttctactgactggtcaacagacaccggcgttcggtcgaagagtatctggtgtcatagaaattgccgatgggagtcgccgtcgtaaagctgctgcacttaccgaaagtgattatcgtgttctggttggcgagctggatgatgagcagatggctgcattatccagattgggtaacgattatcgcccaacaagtgcttatgaacgtggtcagcgttatgcaagccgattgcagaatgaatttgctggaaatatttctgcgctggctgatgcggaaaatatttcacgtaagattattacccgctgtatcaacaccgccaaattgcctaaatcagttgttgctcttttttctcaccccggtgaactatctgcccggtcaggtgatgcacttcaaaaagcctttacagataaagaggaattacttaagcagcaggcatctaaccttcatgagcagaaaaaagctggggtgatatttgaagctgaagaagttatcactcttttaacttctgtgcttaaaacgtcatctgcatcaagaactagtttaagctcacgacatcagtttgctcctggagcgacagtattgtataagggcgataaaatggtgcttaacctggacaggtctcgtgttccaactgagtgtatagagaaaattgaggccattcttaaggaacttgaaaagccagcaccctgatgcgaccacgttttagtctacgtttatctgtctttacttaatgtcctttgttacaggccagaaagcataactggcctgaatattctctctgggcccactgttccacttgtatcgtcggtctgataatcagactgggaccacggtcccactcgtatcgtcggtctgattattagtctgggaccacggtcccactcgtatcgtcggtctgattattagtctgggaccacggtcccactcgtatcgtcggtctgataatcagactgggaccacggtcccactcgtatcgtcggtctgattattagtctgggaccatggtcccactcgtatcgtcggtctgattattagtctgggaccacggtcccactcgtatcgtcggtctgattattagtctggaaccacggtcccactcgtatcgtcggtctgattattagtctgggaccacggtcccactcgtatcgtcggtctgattattagtctgggaccacgatcccactcgtgttgtcggtctgattatcggtctgggaccacggtcccacttgtattgtcgatcagactatcagcgtgagactacgattccatcaatgcctgtcaagggcaagtattgacatgtcgtcgtaacctgtagaacggagtaacctcggtgtgcggttgtatgcctgctgtggattgctgctgtgtcctgcttatccacaacattttgcgcacggttatgtggacaaaatacctggttacccaggccgtgccggcacgttaaccgggctgcatccgatgcaagtgtgtcgctgtcgacgagctcgcgagctcggacatgaggttgccccgtattcagtgtcgctgatttgtattgtctgaagttgtttttacgttaagttgatgcagatcaattaatacgatacctgcgtcataattgattatttgacgtggtttgatggcctccacgcacgttgtgatatgtagatgataatcattatcactttacgggtcctttccggtgatccgacaggttacggggcggcgacctcgcgggttttcgctatttatgaaaattttccggtttaaggcgtttccgttcttcttcgtcataacttaatgtttttatttaaaataccctctgaaaagaaaggaaacgacaggtgctgaaagcgagctttttggcctctgtcgtttcctttctctgtttttgtccgtggaatgaacaatggaagtccgagctcatcgctaataacttcgtatagcatacattatacgaagttatattcgat

SEQ ID NO: 164 - DNA, 30370 bp, synthetic construct
  misc_feature 1..30370: note = seed plasmid 5
  source 1..30370: mol_type = other DNA
gcggccgcttggccactccctctatgcgcgctcgctcactcactcggccctggagaccaaaggtctccagaggccggcagtctctgccggccggccgagtgagtgagcgagcgcgcatagagggagtggccaactccatcatctggccttgatggccaattcgattcgattagggcctacttggcctaatagtaatcaattacggggtcattagttcatagcccatatatggagttccgcgttacataacttacggtaaatggcccgcctggctgaccgcccaacgacccccgcccattgacgtcaataatgacgtatgttcccatagtaacgccaatagggactttccattgacgtcaatgggtggagtatttacggtaaactgcccacttggcagtacatcaagtgtatcatatgccaagtacgccccctattgacgtcaatgacggtaaatggcccgcctggcattatgcccagtacatgaccttatgggactttcctacttggcagtacatctacgtattagtcatcgctattaccatggtgatgcggttttggcagtacatcaatgggcgtggatagcggtttgactcacggggatttccaagtctccaccccattgacgtcaatgggagtttgttttggcaccaaaatcaacgggactttccaaaatgtcgtaacaactccgccccattgacgcaaatgggcggtaggcgtgtacggtgggaggtctatataagcagagctggtttagtgaaccgtcagatgccaccatggtgagcaagggcgaggagctgttcaccggggtggtgcccatcctggtcgagctggacggcgacgtaaacggccacaagttcagcgtgtccggcgagggcgagggcgatgccacctacggcaagctgaccctgaagttcatctgcaccaccggcaagctgcccgtgccctggcccaccctcgtgaccaccctgacctacggcgtgcagtgcttcagccgctaccccgaccacatgaagcagcacgacttcttcaagtccgccatgcccgaaggctacgtccaggagcgcaccatcttcttcaaggacgacggcaactacaagacccgcgccgaggtgaagttcgagggcgacaccctggtgaaccgcatcgagctgaagggcatcgacttcaaggaggacggcaacatcctggggcacaagctggagtacaactacaacagccacaacgtctatatcatggccgacaagcagaagaacggcatcaaggtgaacttcaagatccgccacaacatcgaggacggcagcgtgcagctcgccgaccactaccagcagaacacccccatcggcgacggccccgtgctgctgcccgacaaccactacctgagcacccagtccgccctgagcaaagaccccaacgagaagcgcgatcacatggtcctgctggagttcgtgaccgccgccgggatcactctcggcatggacgagctgtacaagtaagggtggcatccctgtgacccctccccagtgcctctcctggccctggaagttgccactccagtgcccaccagccttgtcctaataaaattaagttgcatcattttgtctgactaggtgtccttctataatattatggggtggaggggggtggtatggagcaaggggcaagttgggaagacaacctgtagggcctgcggggtctattgggaaccaagctggagtgcagtggcacaatcttggctcactgcaatctccgcctcctgggttcaagcgattctcctgcctcagcctcccgagttgttgggattccaggcatgcatgaccaggctcagctaatttttgtttttttggtagagacggggtttcaccatattggccaggctggtctccaactcctaatctcaggtgatctacccaccttggcctcccaaattgctgggattacaggcgtgaaccactgctcccttccctgtccttagatgatggagttggccacattagctatgcgcgctcgctcactcactcggccctggagaccaaaggtctccagaggccggcagtctctgccggccggccgagtgagtgagcgagcgcgcatagagggagtggccaaggcctgattggccgtagaggtagcgggacatccaggtgatgccggcggcggtggtggaggcgcgcggaaactcgcggacgcggttccagatgttgcgcagcggtaggaaataatccatggtcggcacggtctggccggtaagacgtgcgcagtcattgacgctctagaggcaaaaacgaaagcggttgagcaggctcttcctccgtagcctggcggaacgcaaacgggttaggccgcgcgtgtaccccggttcgagtcccctcgaatcaggctaaagccgcgactaacgtggtattggcactcccgtctcgacccaagcccgatagccgccaggatacggtgaagagcctttttgccggccgagtggggtcgctagatttgaaagcggttaaaaaccccgctgggtagtggctcgcgcccgtagtctggacaagcatcactagggttaagttacagcagaacccggttcgcggacggccgcggcaagcgggacttagttaccccgccaatttaaagacccgcagccagccgacttttccagttacgggagcgagcccccttttttctttttgccagatgcatcccgtcctgcgccaaatgcgtcccacccccccggcgaccaccgcaaccgcggccgtagcaggcgccggcgctgtacaacagcagacagagatggatgaacttgctgacgggggtgcccaatggcatgctacaatcgccacaggtactgcccaccctccggcgcaaccaggagaagctctaccgcttccttgcgcaccactccccctactttcgctcccaccgcgccgccatcgaacacgccaccgcttttgataaaatgaaacaactgcgtgtataactcaaataaacagcacttttattttacatgcactggagtatatgcaagttatttaaaagtcaaaggggttctcgcgctcgtcgttgtgcgccgcgctgggaagggccacgttgcggtactggtacttgggctgccacttaaactcggggatcaccagtttaggaacagcaatctcggggaaggtctcgctccacatgcgccggctcatttgcagggcgcccagcatgtccggggcggaaatcttaaaatcgcagttgggaccggtgctttgcgcgcgcgagttgcggtacacagggttgcagcactggaacaccatcagactggggtactttacgctggccagcacgctcttatcgctaatttgatccttgtccaggtcctcggcgttgctcaggccgaacggggtcatcttacacagctggcggcccaggaagggcacgctgtggggcttgtggttacactcgcagtgcacgggcattagcatcattcccgcaccgcgctgcatattcgggtatagggccttaacaaaggccataatctgcttaaaagcttgctgggccttagctccctcgctaaaaaacaggccgcagcttttcccgctaaactggttatttccgcacccggcatcttgcacgcagcagcgcgcgtcatggctggtcagttgcaccacgcttctcccccagcggttctgggtcactttggccttgctgggttgctccttcaacgcgcgctgaccgttctcgctggtcacatccatctccaccacatggtccttgtggatcattaccgtcccgtgcagacacttaagctggccttccacctcggcacagccgtggtcccacagggcactgccggtgcactcccagtttttgtgcgcgatcccgctgtggctaaagatgtaaccttgcaacaggcgacccatcacggtgctaaagctcttctgggtggtaaaggtcagttgcatcccgcgggcctcctcgttcatccaggtctggcacattttttggaatatctcggtctgctccggcataagcttgtaagcattgcgcaggccgctgtcgacgcggtagcgttccatgagcacgtttatggtatccatgcccttctcccaggacgaaaccaaaggcagactcagggggttgcgcacgttcaaaataccaggggtcgcgggctcgacaatgcgttttccgtccttgccttccttcaacagaaccggcggctggctgaatcccactcccacgatcacggcatcttcctggggcatctcttcgtcggggtttaccttggtcacatgtttggtctttctgggctgcttcttttttggagggctgtccactggaaccacgtcctcctcggaagacccggagcccacccgctgatactttcggcgcttggtgggcagaggaggtagcggcggcgaggggctcctttcctgctccggcggatagcgcgccgacccgtggccccggggcggagtggcctctcggtccataaaccggcgcacgtcctgactgccgccggccattgtttcctaggggaagatggaggagcagccgcgtaagcaggagcaggaggaggagaacttaaccacccacgagcaacccaaaattgagcaggacctgggcttggaagagccggctcgtctagaacccccacacgatgaacaggagaagaccaacgctgggctggagcatggctacctaggaggacaggaggatgtgctgctaaaacacttgcagcgccagtcctttatcctccgggacgctctggccgaccgaagcaaaacccccctcagcgtccaggagctgtgtcgggcctacgagctcaacctcttctcgccgcgcgtgccccccaaacgccagcccaacggcacctgcgagcccaacccgcgtcttaacttctaccccgtctttgcggtccccgaggcccttgccacttatcacatattttttaaaaaccaaaaaatccccgtttcctgccgcgccaaccgcacccgcgccgacgcactcctcgctctggggcccggcgcgcgcatacctgatatcgcttccctggaagaggtgcccaagatctttgaagggcttggtcgggacgagacgcgcgcggcgaacgctctaaaagaaacagcagaggaaaagggttacactagcgccctggtagagttggaaggcgataacgccaggctggccgtgcttaagcgcagcgtcgagcttacccatttcgcctaccctgccgttaacctcccgcccaaggtcatgcgtcgcgtcatggatcagcttatcacgccccacattgaggcccttgatgaaagccaaaagcagcgccctgaggacgcccggcccgtggtcagcgacgaaatgcttgcgcgctggctcggaaaccgcgacccccagtccctggaggagcggcgtaagctcatgctggccgtggtcctggtcaccctcgagttggaatgcatgcgccgcttttttagcgaccccgaaaccctgcgcaaggttgaagagaccctgcactacactttcaggcacggctttgtcaggcaggcctgcaagatctctaacgtggagctaaccaacctggtctcctgcctgggtattttacacgagaaccgcctggggcagaccgtgcttcactcgaccctgaagggcgaggcgcggcgggactacatccgcgactgtgtctttctttttctttgccatacctggcagtcggccatgggcgtgtggcagcagtgtctccaggacgagaacctgaaggagctggacaagcttcttgctaaaaaccttaaaaagttatggacgggctttgacgagcgcaccgtcgcctcggacctggccgagattgtttttcctgaacgcctgaggcagacgcttaaaggcgggctgcccgactttatgagccagagcatgttgcaaaactaccgcacttttattctcgagcgatcgggaatcctgcccgccacctgcaatgccttcccctccgactttgtcccgctgagctaccgccagtgtcccccgccgctgtggagccactgctacctcttgcagctggccaactacatcgcccaccactcagacgtgatcgaggacgtaagcggcgaggggctgcttgagtgccactgccgctgcaacctgtgctccccgcaccgctccctggtctgcaacccccagctcctaagcgagacccaggtcatcggtacctttgagctgcaaggtccggaaaactccaccactccgctgaaacttacgccggggttgtggacttccgcgtacctgcgcaaatttgtaccccaggactaccacgcccacgagataaagttctttgaggaccaattgtgcccacagcacgcggatcttacggcctgcgtcatcacccagggcgcaatcctcgcccaattgcacgccatccaaaaatcccgccaagagtttcttctaaaaaagggtaaaggggtttacctggacccccagacaggcgaagtgcttaacccgggtcttccccagcatgccgaggaagaagcaggagccactagtggaggagatggaagaagaatgggacagccaggcagaggaggacgaatgggaggaggaggaggaggaagaattggaagaggtgcaacaggagcaggcaacagagcagcccgtcgccgcaccatccgcgccggcagcccctccggtcaagcctcctcgtagatgggatcaagtgaagggtgacggtaagcaccagcggcagggctaccgatcatggagggcccacaaagccgcgatcattgcctgcttgcaagactgcggggggaacattgcttttgcccgccgctacctgcttttccaccgcggggtaaacatcccccgcaacgtgttgcattactaccgtcaccttcacagctaacaaaaagcaagtaagaggagtcgccggaagaggaggcctcaggattgcggcggacgagcccttcaccaccagggagctaagaaaccgaatattccccactctttatgccatttttcagcagagtcgaggtcagcagcaagagcttaaagtaaaaaatcggtctctgcgctcgctcacccgcagttgcttgtaccacaaaaacgaagatcagctgcagcgcactcttgaagacgccgaggctttgtttcacaagtactgcgcgctcactcttaaagactaaggcgcgcccacccgaaaaaaaggcgggaattacctcatcgccagcaccatgagcaaggagattcccacgccttacatgtggagctatcagccccagatgggcctagccgcgggcgcctcccaggactactccacccgcatgaactggctcagtgccgggccctcaatgatctcacaggtcaacgggatccgtaaccatcgaaaccagatattgttggagcaggcggcagtcacctccacgcccagggcaaagcttaacccgcgtaattggccctccaccctggtgtaccaggaaattcccgggccaactaccgtactacttccgcgtgacgcactggccgaagtccgcatgactaactcaggtgtccagctggccggcggcgcttcccggtgcccgctccgcccacaataaactacctttaaccaggaaactggatgtgaatactctattacatttgattttagttgggccaaaacttatgtaaatgttgaatttgaaactacctcttttaccttttcctatattgcccaagaataaaggataaataaacgtgtttttcatttaaaaatttcatgtatctttattgatttttacaccagcgcgggtacacattctcccaccaccagcccattttacagtgtaaacaattctctcagcacgggtggccttaaataggggaaagttctcattagtgcgggaactggacttggggtttataatccacacagtttcctggcgagccaaacgggggtcggtgattgagatgaagccgtcctttgaaaaatcatccaagtgggcctcgcagtccaaggtcacagtctggtggaatgagaagaacgcacagactcatactcggaaaacaaaatgggtctgtgcctctccatcagcgcccttaacagtctctgccgccggggctcggtgcggctgctacagatgggatcgggatcgcaagtctctttcactataatccccacagcctttagcattagtcttctggtgcgtcgggcacagcaccgcatcctaatctcgctcatgttttcacagtaagtgcagcacataatgaccatgttattcagcagcccataatttagggtgctccagccaaagcttatgttggaaatgatggaacccacgtgaccatcgtaccaaatgcggcagtatatcaggtgcctgccccttataaacacactgcccatatacataatctctttggacaagtttctatttacaatctgccggtaccaggggaagcgctggttgaacatgcacccgtaaatgactctcctaaaccacacggccagcagggtgcctcccgcccggcactgcagggagcccggggataaacagtggcaatgcaggatccagcgctcgtacccgcttaccatctgggctcttaccagatccagggtagcgggacacaggcacactgacatacatctttttaaaatttttatttcctttcgggtcaggatcatatcccaggggactggaaactcttggagcagggtaaaaccagcagcacatggtaatccacggacagaacttacattatgataatctgcatgatcacaatcgggcaatacagggtgttgttcagtcaaagaggccctggtctccttatcatatcgtggtaaacgggccctgcgatatggataatggcggagcaaggttgattgttccttggtgctcattgtagtgcaccctcttgcgtacctcgttgtacttttgccagcagaaagtggccctggaacagcaaatacctctcctccgaccgtcctttcgctgttgccgctcagtcatccaactgaagtacatccattcccaaaggttgtgaagaagttcctttgtatctaatgaaacaaaaagcccgtccatgcggattcccctcatcacatcagccaggactctgtaggccatccccatccagttaatgctgccttgtctatcatttaaagggggcggtggcaaaattggaagaaccatttttattccaaacggtctcgaaggacgataaagtgcaagtcacgcaggtgacagcgatcaccgccgctgtgttggtggaaacatacagccaggtcaaaacccactctattttcaaggtgctcgactgtggcttcgagcagtggctctacgcgtacatccagcataagaatcacattaaaagccggccctccatcgatttcatcaatcatcatgttacattcctgcaccatccccaggtaattctcatttttccagccttggattatttctacaaattgttggtgtaagtccactccgcacatgtggaaaagctcccatagcgccccctccactttcataatcaggcagaccttcataatagaaacaaatcctgctgctccaccacctgcagcgtgtttaaaacaacaacatttaataaggttctgccctcagcccttagctgacgtctaagtgtcagctgcaaaaagtcacttaagtcctgggccactacagctgacaattcagagccagggctaagcgtgggactggcaagcgtaagggagtactttaatgctccaaagctagcacctaaaaactgcatgctggaataagctctttttgtatctccggtaatgccttccaaaatgtgagtaataaagcgaggtagtttttctttaatcatgttagtaatagaaaaatcctctaaatacgtcactaggaccccagggaccacaatgtggtagcttacaccgcgtcgctgaagcatggttagtagagatgaaagtctgaaaaacaaaaagcatgcgctaaaccaaggtggctatttttactgaaggaaaaattactttttttagcagcagggtgcccactgggtggcccttgcggacatacaaaaattggtccgtgtgattaaaaagcagtacagcaagctcctgtcttctcccggcaaaaatcacatcggactgggttagtatgcccctggcatggtagtcatttaaagccataaatgtgccctgataaccagtaggaacgagtacactgacttttaggtaaaccaataccaccccatgcggaaaaatataaaaagaatcaggacaaaaaaaggtatatttattgctagccccttcctggacgggagccatccctccagggctatctataaaagcatagagacattcagccatagcttagcccgcttaccagtagacaaagagcacagcagtacaagcgccaacagcaataactacttactgttccagctcagtacttaaaggcagcttacactgacgtaatgaccaaaggtgtaaaaaccccgccaaaaaaaaacacacacgccctaggtgtttttcgtaaaaacacttccgcgttctcacttcctcgtatcaattttgtgacttaacttccgggttcccacgttacgtcacttttgcccttacatgtgactgtgccatagggcgccattttcccgtgcccaatatggctaaagtccgcttttttatacgtcatcggccccgcgacttgcttccgggttgggccacgcctttgcggcaggcctatgtggcccagagagggagtggccaactccatcactaggggtagcgcgaagcgcctcccacgctgccgcgtcagcgctgacgtaaattacgtcataggggagtggtcctgtattagctgtcacgtgagtgcttttgcggcattttgcgacaccacgtggccatttgaggtatatatggccgagtgagcgagcaggatctccattttgaccgcgaaatttgaacgagcagcagccatgccgggcttctacgagatcgtgatcaaggtgccgagcgacctggacgagcacctgccgggcatttctgactcgtttgtgaactgggtggccgagaaggaatgggagctgcccccggattctgacatggatcggaatctgatcgagcaggcacccctgaccgtggccgagaagctgcagcgcgacttcctggtccaatggcgccgcgtgagtaaggctccggaggccctcttctttgttcagttcgagaagggcgagagctactttcacctgcacgttctggtcgagaccacgggggtcaagtccatggtgctaggccgcttcctgagtcagattcgggaaaagcttggtccagaccatctacccgcggggtcgagccccaccttgcccaactggttcgcggtgaccaaagacgcggtaatggcgccggcgggggggaacaaggtggtggacgagtgctacatccccaactacctcctgcccaagactcagcccgagctgcagtgggcgtggactaacatggaggagtatataagcgcgtgcttgaacctggccgagcgcaaacggctcgtggcgcagcacctgacccacgtcagccagacgcaggagcagaacaaggagaatctgaaccccaattctgacgcgcccgtgatcaggtcaaaaacctccgcgcgctatatggagctggtcgggtggctggtggaccggggcatcacctccgagaagcagtggatccaggaggaccaggcctcgtacatctccttcaacgccgcctccaactcgcggtcccagatcaaggccgcgctggacaatgccggcaagatcatggcgctgaccaaatccgcgcccgactacctggtggggccctcgctgcccgcggacattacccagaaccgcatctaccgcatcctcgctctcaacggctacgaccctgcctacgccggctccgtctttctcggctgggctcagaaaaagttcgggaaacgcaacaccatctggctgtttggacccgccaccaccggcaagaccaacattgcggaagccatcgcccacgccgtgcccttctacggctgcgtcaactggaccaatgagaactttcccttcaatgattgcgtcgacaagatggtgatctggtgggaggagggcaagatgacggccaaggtcgtggagtccgccaaggccattctcggcggcagcaaggtgcgcgtggaccaaaagtgcaagtcgtccgcccagatcgaccccacccccgtgatcgtcacctccaacaccaacatgtgcgccgtgattgacgggaacagcaccaccttcgagcaccagcagcctctccaggaccggatgtttaagttcgaactcacccgccgtctggagcacgactttggcaaggtgacaaagcaggaagtcaaagagttcttccgctgggccagtgatcacgtgaccgaggtggcgcatgagttttacgtcagaaagggcggagccagcaaaagacccgcccccgatgacgcggataaaagcgagcccaagcgggcctgcccctcagtcgcggatccatcgacgtcagacgcggaaggagctccggtggactttgccgacaggtaccaaaacaaatgttctcgtcacgcgggcatgcttcagatgctgtttccctgcaaaacgtgcgagagaatgaatcagaatttcaacatttgcttcacacacggggtcagagactgctcagagtgtttccccggcgtgtcagaatctcaaccggtcgtcagaaagaggacgtatcggaaactctgtgcgattcatcatctgctggggcgggctcccgagattgcttgctcggcctgcgatctggtcaacgtggacctggatgactgtgtttctgagcaataaatgacttaaaccaggtggcctctatggccatggctgccgatggttatcttccagattggctcgaggacactctctctgaaggaataagacagtggtggaagctcaaacctggcccaccaccaccaaagcccgcagagcggcataaggacgacagcaggggtcttgtgcttcctgggtacaagtacctcggacccttcaacggactcgacaagggagagccggtcaacgaggcagacgccgcggccctcgagcacgacaaagcctacgaccggcagctcgacagcggagacaacccgtacctcaagtacaaccacgccgacgcggagtttcaggagcgccttaaagaagatacgtcttttgggggcaacctcggacgagcagtcttccaggcgaaaaagagggttcttgaacctctgggcctggttgaggaacctgttaagacggctccgggaaaaaagaggccggtagagcactctcctgtggagccagactcctcctcgggaaccggaaaggcgggccagcagcctgcaagaaaaagattgaattttggtcagactggagacgcagactcagtacctgacccccagcctctcggacagccaccagcagccccctctggtctgggaactaatacgatggctacaggcagtggcgcaccaatggcagacaataacgagggcgccgacggagtgggtaattcctcgggaaattggcattgcgattccacatggatgggcgacagagtcatcaccaccagcacccgaacctgggccctgcccacctacaacaaccacctctacaaacaaatttccagccaatcaggagcctcgaacgacaatcactactttggctacagcaccccttgggggtattttgacttcaacagattccactgccacttttcaccacgtgactggcaaagactcatcaacaacaactggggattccgacccaagagactcaacttcaagctctttaacattcaagtcaaagaggtcacgcagaatgacggtacgacgacgattgccaataaccttaccagcacggttcaggtgtttactgactcggagtaccagctcccgtacgtcctcggctcggcgcatcaaggatgcctcccgccgttcccagcagacgtcttcatggtgccacagtatggatacctcaccctgaacaacgggagtcaggcagtaggacgctcttcattttactgcctggagtactttccttctcagatgctgcgtaccggaaacaactttaccttcagctacacttttgaggacgttcctttccacagcagctacgctcacagccagagtctggaccgtctcatgaatcctctcatcgaccagtacctgtattacttgagcagaacaaacactccaagtggaaccaccacgcagtcaaggcttcagttttctcaggccggagcgagtgacattcgggaccagtctaggaactggcttcctggaccctgttaccgccagcagcgagtatcaaagacatctgcggataacaacaacagtgaatactcgtggactggagctaccaagtaccacctcaatggcagagactctctggtgaatccgggcccggccatggcaagccacaaggacgatgaagaaaagttttttcctcagagcggggttctcatctttgggaagcaaggctcagagaaaacaaatgtggacattgaaaaggtcatgattacagacgaagaggaaatcaggacaaccaatcccgtggctacggagcagtatggttctgtatctaccaacctccagagaggcaacagacaagcagctaccgcagatgtcaacacacaaggcgttcttccaggcatggtctggcaggacagagatgtgtaccttcaggggcccatctgggcaaagattccacacacggacggacattttcacccctctcccctcatgggtggattcggacttaaacaccctcctccacagattctcatcaagaacaccccggtacctgcgaatccttcgaccaccttcagtgcggcaaagtttgcttccttcatcacacagtactccacgggacaggtcagcgtggagatcgagtgggagctgcagaaggaaaacagcaaacgctggaatcccgaaattcagtacacttccaactacaacaagtctgttaatgtggactttactgtggacactaatggcgtgtattcagagcctcgccccattggcaccagatacctgactcgtaatctgttgcttgttaatcaataaaccgtttaattcgtttcagttgaactttggtctctgcgtatttctttcttatctagtttccatggctacgtagataagtagcatggcgggttaatcattaactacagcccgggcgtttaaacagcgggcggaggggtggagtcgtgacgtgaattacgtcatagggttagggaggtcctgtattagaggtcacgtgagtgttttgcgacattttgcgacaccatgtggtctcgctgggggggggggcccgagtgagcacgcagggtctccattttgaagcgggaggtttgaacgcggccgcaaaaggccttcttggccaccccgggccgtcgaccaattctcatgtttgacagcttatcatcgaatttctgccattcatccgcttattatcacttattcaggcgtagcaaccaggcgtttaagggcaccaataactgccttaaaaaaattacgccccgccctgccactcatcgcagtactgttgtaattcattaagcattctgccgacatggaagccatcacaaacggcatgatgaacctgaatcgccagcggcatcagcaccttgtcgccttgcgtataatatttgcccatggtgaaaacgggggcgaagaagttgtccatattggccacgtttaaatcaaaactggtgaaactcacccagggattggctgagacgaaaaacatattctcaataaaccctttagggaaataggccaggttttcaccgtaacacgccacatcttgcgaatatatgtgtagaaactgccggaaatcgtcgtggtattcactccagagcgatgaaaacgtttcagtttgctcatggaaaacggtgtaacaagggtgaacactatcccatatcaccagctcaccgtctttcattgccatacggaattccggatgagcattcatcaggcgggcaagaatgtgaataaaggccggataaaacttgtgcttatttttctttacggtctttaaaaaggccgtaatatccagctgaacggtctggttataggtacattgagcaactgactgaaatgcctcaaaatgttctttacgatgccattgggatatatcaacggtggtatatccagtgatttttttctccattttagcttccttagctcctgaaaatctcgataactcaaaaaatacgcccggtagtgatcttatttcattatggtgaaagttggaacctcttacgtgccgatcaacgtctcattttcgccaaaagttggcccagggcttcccggtatcaacagggacaccaggatttatttattctgcgaagtgatcttccgtcacaggtatttattcgcgataagctcatggagcggcgtaaccgtcgcacaggaaggacagagaaagcgcggatctgggaagtgacggacagaacggtcaggacctggattggggaggcggttgccgccgctgctgctgacggtgtgacgttctctgttccggtcacaccacatacgttccgccattcctatgcgatgcacatgctgtatgccggtataccgctgaaagttctgcaaagcctgatgggacataagtccatcagttcaacggaagtctacacgaaggtttttgcgctggatgtggctgcccggcaccgggtgcagtttgcgatgccggagtctgatgcggttgcgatgctgaaacaattatcctgagaataaatgccttggcctttatatggaaatgtggaactgagtggatatgctgtttttgtctgttaaacagagaagctggctgttatccactgagaagcgaacgaaacagtcgggaaaatctcccattatcgtagagatccgcattattaatctcaggagcctgtgtagcgtttataggaagtagtgttctgtcatgatgcctgcaagcggtaacgaaaacgatttgaatatgccttcaggaacaatagaaatcttcgtgcggtgttacgttgaagtggagcggattatgtcagcaatggacagaacaacctaatgaacacagaaccatgatgtggtctgtccttttacagccagtagtgctcgccgcagtcgagcgacagggcgaagccctcgagtgagcgaggaagcaccagggaacagcacttatatattctgcttacacacgatgcctgaaaaaacttcccttggggttatccacttatccacggggatatttttataattattttttttatagtttttagatcttcttttttagagcgccttgtaggcctttatccatgctggttctagagaaggtgttgtgacaaattgccctttcagtgtgacaaatcaccctcaaatgacagtcctgtctgtgacaaattgcccttaaccctgtgacaaattgccctcagaagaagctgttttttcacaaagttatccctgcttattgactcttttttatttagtgtgacaatctaaaaacttgtcacacttcacatggatctgtcatggcggaaacagcggttatcaatcacaagaaacgtaaaaatagcccgcgaatcgtccagtcaaacgacctcactgaggcggcatatagtctctcccgggatcaaaaacgtatgctgtatctgttcgttgaccagatcagaaaatctgatggcaccctacaggaacatgacggtatctgcgagatccatgttgctaaatatgctgaaatattcggattgacctctgcggaagccagtaaggatatacggcaggcattgaagagtttcgcggggaaggaagtggttttttatcgccctgaagaggatgccggcgatgaaaaaggctatgaatcttttccttggtttatcaaacgtgcgcacagtccatccagagggctttacagtgtacatatcaacccatatctcattcccttctttatcgggttacagaaccggtttacgcagtttcggcttagtgaaacaaaagaaatcaccaatccgtatgccatgcgtttatacgaatccctgtgtcagtatcgtaagccggatggctcaggcatcgtctctctgaaaatcgactggatcatagagcgttaccagctgcctcaaagttaccagcgtatgcctgacttccgccgccgcttcctgcaggtctgtgttaatgagatcaacagcagaactccaatgcgcctctcatacattgagaaaaagaaaggccgccagacgactcatatcgtattttccttccgcgatatcacttccatgacgacaggatagtctgagggttatctgtcacagatttgagggtggttcgtcacatttgttctgacctactgagggtaatttgtcacagttttgctgtttccttcagcctgcatggattttctcatactttttgaactgtaatttttaaggaagccaaatttgagggcagtttgtcacagttgatttccttctctttcccttcgtcatgtgacctgatacgcgtgctaccttaagagagtcaattcgcccttcccggtcgatatgaacagcttatttacataattcacgttattggtagttataaatgaaattcctaatatcggttatgaagtgaaattgaatttctacttgatctttctctctatttttgtaaaataaaattaagaatatttaaatattcaatgattcatttttgcagaaatcggaggaagaagaatatatgaaaacatttaacatttctcaacaagatccccccatattgttgtataagtgatgaaatactgaatttaaaacttagtttatatgtggtaaaatgttttaatcaagtttaggaggaattaattatgaagtgtaatgaataatgaatgtaacagggttcaattaaaagagggaagcgtatcattaaccctataaactacgtctgccctcattattggagggtgaaatgtgaatacatcctattcacaatcgaatttacgacacaaccaaattttaatttggctttgcattttatctttttttagcgtattaaatgaaatggttttgaacgtctcattacctgatattgcaaatgattttaataaaccaccagcgagtacaaactgggtgaacacagcctttatgttaaccttttccattggaacagctgtatatggaaagctatctgatcaattaggcatcaaaaggttactcctatttggaattataataaattgtttcgggtcggtaattgggtttgttggccattctttcttttccttacttattatggctcgttttattcaaggggctggtgcagctgcatttccagcactcgtaatggttgtagttgcgcgctatattccaaaggaaaataggggtaaagcatttggtcttattggatcgatagtagccatgggagaaggagtcggtccagcgattggtggaatgatagcccattatattcattggtcctatcttctactcattcctatgataacaattatcactgttccgtttcttatgaaattattaaagaaagaagtaaggataaaaggtcattttgatatcaaaggaattatactaatgtctgtaggcattgtattttttatgttgtttacaacatcatatagcatttcttttcttatcgttagcgtgctgtcattcctgatatttgtaaaacatatcaggaaagtaacagatccttttgttgatcccggattagggaaaaatataccttttatgattggagttctttgtgggggaattatatttggaacagtagcagggtttgtctctatggttccttatatgatgaaagatgttcaccagctaagtactgccgaaatcggaagtgtaattattttccctggaacaatgagtgtcattattttcggctacattggtgggatacttgttgatagaagaggtcctttatacgtgttaaacatcggagttacatttctttctgttagctttttaactgcttcctttcttttagaaacaacatcatggttcatgacaattataatcgtatttgttttaggtgggctttcgttcaccaaaacagttatatcaacaattgtttcaagtagcttgaaacagcaggaagctggtgctggaatgagtttgcttaactttaccagctttttatcagagggaacaggtattgcaattgtaggtggtttattatccatacccttacttgatcaaaggttgttacctatggaagttgatcagtcaacttatctgtatagtaatttgttattacttttttcaggaatcattgtcattagttggctggttaccttgaatgtatataaacattctcaaagggatttctaaatcgttaagggatcaactttgggagagagttcaaaattgatcctttttttataacaggaattgggcatcaaataaaacgaaaggctcagtcgaaagactgggcctttcgttttatctgttgtttgtcggtgaacgctctcctgagtaggacaaatccgccgggagcggatttgaacgttgcgaagcaacggcccggagggtggcgggcaggacgcccgccataaactgccaggcatcaaattaagcagaaggccatcctgacggatggcctttttgcgtttctacaaactcttcctgtcgtcatatctacaattctacacagcccagtccagactattcggcactgaaattatgggtgaagtggtcaagacctcactaggcaccttaaaaatagcgcaccctgaagaagatttatttgaggtagcccttgcctacctagcttccaagaaagatatcctaacagcacaagagcggaaagatgttttgttctacatccagaacaacctctgctaaaattcctgaaaaattttgcaaaaagttgttgactttatctacaaggtgtggcataatgtgtggaattgtgagcggataacaattaagctaattctatggtaaaagcattcctgaacccaatatccttatttttagtggacaaggccttgttctcatatggttgcttgagccagtgccttacaaggctcttccgctttggcaggctgttcaaaattatttattagagcaactcaaggaactaggcggagatccaaaagcaaccgatgcagcacgtgtttttcggattgctgggagcgtcaatagtaagaatggagcggaagtaagagcggaatatcggcacgattacagatatgagttaaggcagattcaatttgattaccttccagaactcaatgaggttattaatcccgctccacaaaagaaaaaacgggggcgtaaaaagaaagtagttcagttattcaatacctacaaactccattacgctcgcctattggatatagtgaaattggtggaactacgaaattatgaggtaactggatacagggaaatcatttgctttttataccgttattggttgtgctgttacacgaacgaccctgtagaggctttaaatcaaacacagacacttaatttacagttcactgagcctttacccttaaaagaggttgaaagggctacacggagcgcagaaaaggcgtgggaagcacgaaataacgaagaggctaaccggattgcaatcgaaaaaggatatcccagtgctggatacaatattagcaataaaaagttgattgaatggctagatatcacaccagaagaacagaagcatttacagacgattatagacgctaatgagaaacggagaagaaagcgggaaagggataggatttatcaagaacaaaaacgtcgtgagcggggagatatgacccgacaggagtatattaagcaacaacaggataaaacagatgataaattatttaaattgcaggagttattagaacagaatcccaaaatctcaaaaattaaattagcaaaaatacttggtgtagataaatcgcacttatacagactgctgaaacaactataactggaaaaaattagtgtctcatggttcgtcgcccttatattatgggcgttagcctgcttgctaattggataggtgttattgtcatttcaacgtcggacgttttggtagatgaacgtcggacgttatttgcttcaatagattgttgatgtattaagggttgcagtgaatcgacaagcaaaaagttatgacgttgtgaaaaaattgaatagaaaattggaaattacgtcggacgttctaacttaaaaaccctgttatatcaatgatttaaaaggaaattaacgtcataaaagacctttctgcaacaaaagtttttctggaagagttgaggttattttataggtattatggacttttgtagactttttgtgtactttttgtggactccacactcgctggtatcgtgttattttttaattgagatatgaatatggaaattaaacgttttaggcgttggtttggtgatgacaaaaaaataagagtacccgctcacaacggatactctttcgagaaatgtacgaaacgctataaataaaaaataactagatacatttacattgtatcacgtttcgtacatttctccaataacaaattgattggaggaatgcaaagtgaataatgaaccagtaaaacgtggtaagaagaacagatgggaattaaacctacctataatgacttatgtagtagctgatgattggattgataaactaggacacgaaacgtttactttatggttgaggttccatacttgggtagatagagaagatgaactccgagattatgatcgcatacctagaagttttgagaacatatataaaaagacactaggaatctcaaaaagtaagttttatagattgataaaacctttatgggaatatggattaatagacatcatagaatacgaagaatctaaccgtaattctactaaacctaaaaatataattgtttatgagtatcctttacacgaaatagaaagaaagtataaaccactagaaaaattaagagattgggataaagactataattccgtttctaaagaattaggtaaaacaggtggtagaccaaggaaaaaagatagtgaagaagaacccgaaaagaaacccgaagaagtaactaaaaagaaacgtaaatataagttaaaaagagttatccacaacggtttcaaaaatgaaacggtggagggtttcaaaaatgaaacggtggagggtttcaaaaatgaaacggtgaccgtttcaaaaataaaacccaataattattcaaatatctttaataacttatcaaatatttctactaatgtttcaaataatttattaattgatgatgatgaggaaatcgaaaatgaaccaactggtcgtacaataaataggtcattacttttttcacaagaagatattaaacaggcctatcaatttattaatagattttcagttatacagttacgtgaaaactttagctttgataaacactttgaagaacggttggtatgttatttatggaaagcagggatttctactttttacacgcacgaaatcagtaaaatgataaaaaaaatagcagactatgaaaaatctaaaaaaggtagattaaacccaatacgtgaccgagccttatatatggtaaatggtcttgtaatgaatagagcttcttcccaaagtgaacatgctacttataaactaaaccaatataaaaaacagaaggaacaggaaaaacaacaacaggagcaacaaagatcaagagtaccgttctataattggttggaggaaagagaagaacaaaccgaaggtcaactacccaccacttaaagcctaacggcttttgaagtggggcttgtaaaaagccctagttgactaccccaagtctttcgaggactacgttggaaaggtcatgacacctacaaatgctcctctagttcgtagccactgtcgttgatggttaaaagtcctgatgggtagggacggtgctgtcaacatcacaagcccttccaacatgggggaagaggaagaacactccgagaaaggagggggctgtcgtacacgccttgttcgtgtacgtgatttttaacacttttatctctaatataatctctccttgagttagcagagactaagaataaaacacattaggattttttatctacataaggaggttcaatacatgcctactatttcgtttaagggaaagtcttttgtacaaaatcatcacttgactgtaaaatatcatgaattgatcccagaaccagaaaaaagtctgaccgataaagttagtcttcatgacaatcttatcattcatggggacaatttaaaggcgttgaaagctctactacctacatatgctggtaagatagattgcatctatattgacccaccatacaatactggaactgaaaaatggatttataatgataatgtcaactccccaatgattagggaatggcttggaaaagtggtagacaaagaagacttatcccgacatgataagtggctttgtatgatgatgccgaggttaaaactgttgaaagagttgttgtcagaagacggagtgatatttgtaagcattgactacaatgaaatacaccatcttacgtgccttatgaacgaaatattcggtgaggagaattttcgtgacgctattatcattcgtagaggagtaaaaaatgttcaagcgcaatttgacacaattgattctctttcaaatggttatgagtctattttggtttacactaaacagccatctcgacgatttaataaggtttatgaagatgtagaagaaaagcctggtagttggaataatcattggagaggtacagaccgtaaaactatgagatatgaattatttggggttactccgacagaaggtcaatggagatgggggaaagaacgtagtctccaggctattgaaaactatcaaatgatgttagatgaacttagacaaaaaggcattactaatccaactcaagaggatattgataaatggtatcttgaatatgtagaaaataatggggaagatattgacttgttacgacaaaatgataatggcacgattgagcactttgttccaccgactagcaaaaagttgttaagtaatgcctggtttgacttaaaacccaacggttctagtcaattaaagaagatatttggaaggaaggttttcgataaccctaaatcaattgatttggtaaaaagactaatacaatttgcgactgaaaacaaagaagcgattgtacttgactcatttgcagggagtggcactactgctcatgcagtattatcgcttaacaaacaagatggagggaatcgtcgtttcatccttattgagatggaagaatatgcacatgagattaccgcagaacgcggatctttatcgatttgcatgcaagctaattcggtggaaacgaggtcatcatttccttccgaaaaaacggttgcatttaaatcttacatatgtaatactttcaaagactacatttgtaagatttgatgtttgagtcggctgaaagatcgtacgtaccaattattgtttcgtgattgttcaagccataacactgtagggatagtggaaagagtgcttcatctggttacgatcaatcaaatattcaaacggagggagacgattttgatgaaaccagtaacgttatacgatgtcgcagagtatgccggtgtctcttatcagaccgtttcccgcgtggtgaaccaggccagccacgtttctgcgaaaacgcgggaaaaagtggaagcggcgatggcggagctgaattacattcccaaccgcgtggcacaacaactggcgggcaaacagtcgttgctgattggcgttgccacctccagtctggccctgcacgcgccgtcgcaaattgtcgcggcgattaaatctcgcgccgatcaactgggtgccagcgtggtggtgtcgatggtagaacgaagcggcgtcgaagcctgtaaaacggcggtgcacaatcttctcgcgcaacgcgtcagtgggctgatcattaactatccgctggatgaccaggatgccattgctgtggaagctgcctgcactaatgttccggcgttatttcttgatgtctctgaccagacacccatcaacagtattattttctcccatgaagacggtacgcgactgggcgtggagcatctggtcgcattgggtcaccagcaaatcgcgctgttagcgggcccattaagttctgtctcggcgcgtctgcgtctggctggctggcataaatatctcactcgcaatcaaattcagccgatagcggaacgggaaggcgactggagtgccatgtccggttttcaacaaaccatgcaaatgctgaatgagggcatcgttcccactgcgatgctggttgccaacgatcagatggcgctgggcgcaatgcgcgccattaccgagtccgggctgcgcgttggtgcggatatctcggtagtgggatacgacgataccgaagacagctcatgttatatcccgccgttaaccaccatcaaacaggattttcgcctgctggggcaaaccagcgtggaccgcttgctgcaactctctcagggccaggcggtgaagggcaatcagctgttgcccgtctcactggtgaaaagaaaaaccaccctggcgcccaatacgcaaaccgcctctccccgcgcgttggccgattcattaatgcagctggcacgacaggtttcccgactggaaagcgggcagtgagcgcaacgcaattaatgtgagttaggatcgctaccttaagagagacgcgttatcgggggttagttcgtcatcattgatgagggttgattatcacagtttattactctgaattggctatccgcgtgtgtacctctacctggagtttttcccacggtggatatttcttcttgcgctgagcgtaagagctatctgacagaacagttcttctttgcttcctcgccagttcgctcgctatgctcggttacacggctgcggcgagcgctagtgataataagtgactgaggtatgtgctcttcttatctccttttgtagtgttgctcttattttaaacaactttgcggttttttgatgactttgcgattttgttgttgctttgcagtaaattgcaagatttaataaaaaaacgcaaagcaatgattaaaggatgttcagaatgaaactcatggaaacacttaaccagtgcataaacgctggtcatgaaatgacgaaggctatcgccattgcacagtttaatgatgacagcccggaagcgaggaaaataacccggcgctggagaataggtgaagcagcggatttagttggggtttcttctcaggctatcagagatgccgagaaagcagggcgactaccgcacccggatatggaaattcgaggacgggttgagcaacgtgttggttatacaattgaacaaattaatcatatgcgtgatgtgtttggtacgcgattgcgacgtgctgaagacgtatttccaccggtgatcggggttgctgcccataaaggtggcgtttacaaaacctcagtttctgttcatcttgctcaggatctggctctgaaggggctacgtgttttgctcgtggaaggtaacgacccccagggaacagcctcaatgtatcacggatgggtaccagatcttcatattcatgcagaagacactctcctgcctttctatcttggggaaaaggacgatgtcacttatgcaataaagcccacttgctggccggggcttgacattattccttcctgtctggctctgcaccgtattgaaactgagttaatgggcaaatttgatgaaggtaaactgcccaccgatccacacctgatgctccgactggccattgaaactgttgctcatgactatgatgtcatagttattgacagcgcgcctaacctgggtatcggcacgattaatgtcgtatgtgctgctgatgtgctgattgttcccacgcctgctgagttgtttgactacacctccgcactgcagtttttcgatatgcttcgtgatctgctcaagaacgttgatcttaaagggttcgagcctgatgtacgtattttgcttaccaaatacagcaatagtaatggctctcagtccccgtggatggaggagcaaattcgggatgcctggggaagcatggttctaaaaaatgttgtacgtgaaacggatgaagttggtaaaggtcagatccggatgagaactgtttttgaacaggccattgatcaacgctcttcaactggtgcctggagaaatgctctttctatttgggaacctgtctgcaatgaaattttcgatcgtctgattaaaccacgctgggagattagataatgaagcgtgcgcctgttattccaaaacatacgctcaatactcaaccggttgaagatacttcgttatcgacaccagctgccccgatggtggattcgttaattgcgcgcgtaggagtaatggctcgcggtaatgccattactttgcctgtatgtggtcgggatgtgaagtttactcttgaagtgctccggggtgatagtgttgagaagacctctcgggtatggtcaggtaatgaacgtgaccaggagctgcttactgaggacgcactggatgatctcatcccttcttttctactgactggtcaacagacaccggcgttcggtcgaagagtatctggtgtcatagaaattgccgatgggagtcgccgtcgtaaagctgctgcacttaccgaaagtgattatcgtgttctggttggcgagctggatgatgagcagatggctgcattatccagattgggtaacgattatcgcccaacaagtgcttatgaacgtggtcagcgttatgcaagccgattgcagaatgaatttgctggaaatatttctgcgctggctgatgcggaaaatatttcacgtaagattattacccgctgtatcaacaccgccaaattgcctaaatcagttgttgctcttttttctcaccccggtgaactatctgcccggtcaggtgatgcacttcaaaaagcctttacagataaagaggaattacttaagcagcaggcatctaaccttcatgagcagaaaaaagctggggtgatatttgaagctgaagaagttatcactcttttaacttctgtgcttaaaacgtcatctgcatcaagaactagtttaagctcacgacatcagtttgctcctggagcgacagtattgtataagggcgataaaatggtgcttaacctggacaggtctcgtgttccaactgagtgtatagagaaaattgaggccattcttaaggaacttgaaaagccagcaccctgatgcgaccacgttttagtctacgtttatctgtctttacttaatgtcctttgttacaggccagaaagcataactggcctgaatattctctctgggcccactgttccacttgtatcgtcggtctgataatcagactgggaccacggtcccactcgtatcgtcggtctgattattagtctgggaccacggtcccactcgtatcgtcggtctgattattagtctgggaccacggtcccactcgtatcgtcggtctgataatcagactgggaccacggtcccactcgtatcgtcggtctgattattagtctgggaccatggtcccactcgtatcgtcggtctgattattagtctgggaccacggtcccactcgtatcgtcggtctgattattagtctggaaccacggtcccactcgtatcgtcggtctgattattagtctgggaccacggtcccactcgtatcgtcggtctgattattagtctgggaccacgatcccactcgtgttgtcggtctgattatcggtctgggaccacggtcccacttgtattgtcgatcagactatcagcgtgagactacgattccatcaatgcctgtcaagggcaagtattgacatgtcgtcgtaacctgtagaacggagtaacctcggtgtgcggttgtatgcctgctgtggattgctgctgtgtcctgcttatccacaacattttgcgcacggttatgtggacaaaatacctggttacccaggccgtgccggcacgttaaccgggctgcatccgatgcaagtgtgtcgctgtcgacgagctcgcgagctcggacatgaggttgccccgtattcagtgtcgctgatttgtattgtctgaagttgtttttacgttaagttgatgcagatcaattaatacgatacctgcgtcataattgattatttgacgtggtttgatggcctccacgcacgttgtgatatgtagatgataatcattatcactttacgggtcctttccggtgatccgacaggttacggggcggcgacctcgcgggttttcgctatttatgaaaattttccggtttaaggcgtttccgttcttcttcgtcataacttaatgtttttatttaaaataccctctgaaaagaaaggaaacgacaggtgctgaaagcgagctttttggcctctgtcgtttcctttctctgtttttgtccgtggaatgaacaatggaagtccgagctcatcgctaataacttcgtatagcatacattatacgaagttatattcgat

SEQ ID NO: 165 - DNA, 30652 bp, synthetic construct
  misc_feature 1..30652: note = seed plasmid 6
  source 1..30652: mol_type = other DNA
gcggccgccctgcaggcagctgcgcgctcgctcgctcactgaggccgcccgggcaaagcccgggcgtcgggcgacctttggtcgcccggcctcagtgagcgagcgagcgcgcagagagggagtggccaactccatcactaggggttcctggccttgatggccaattcgattcgattagggcctacttggcctaatagtaatcaattacggggtcattagttcatagcccatatatggagttccgcgttacataacttacggtaaatggcccgcctggctgaccgcccaacgacccccgcccattgacgtcaataatgacgtatgttcccatagtaacgccaatagggactttccattgacgtcaatgggtggagtatttacggtaaactgcccacttggcagtacatcaagtgtatcatatgccaagtacgccccctattgacgtcaatgacggtaaatggcccgcctggcattatgcccagtacatgaccttatgggactttcctacttggcagtacatctacgtattagtcatcgctattaccatggtgatgcggttttggcagtacatcaatgggcgtggatagcggtttgactcacggggatttccaagtctccaccccattgacgtcaatgggagtttgttttggcaccaaaatcaacgggactttccaaaatgtcgtaacaactccgccccattgacgcaaatgggcggtaggcgtgtacggtgggaggtctatataagcagagctggtttagtgaaccgtcagatgccaccatggtgagcaagggcgaggagctgttcaccggggtggtgcccatcctggtcgagctggacggcgacgtaaacggccacaagttcagcgtgtccggcgagggcgagggcgatgccacctacggcaagctgaccctgaagttcatctgcaccaccggcaagctgcccgtgccctggcccaccctcgtgaccaccctgacctacggcgtgcagtgcttcagccgctaccccgaccacatgaagcagcacgacttcttcaagtccgccatgcccgaaggctacgtccaggagcgcaccatcttcttcaaggacgacggcaactacaagacccgcgccgaggtgaagttcgagggcgacaccctggtgaaccgcatcgagctgaagggcatcgacttcaaggaggacggcaacatcctggggcacaagctggagtacaactacaacagccacaacgtctatatcatggccgacaagcagaagaacggcatcaaggtgaacttcaagatccgccacaacatcgaggacggcagcgtgcagctcgccgaccactaccagcagaacacccccatcggcgacggccccgtgctgctgcccgacaaccactacctgagcacccagtccgccctgagcaaagaccccaacgagaagcgcgatcacatggtcctgctggagttcgtgaccgccgccgggatcactctcggcatggacgagctgtacaagtaagggtggcatccctgtgacccctccccagtgcctctcctggccctggaagttgccactccagtgcccaccagccttgtcctaataaaattaagttgcatcattttgtctgactaggtgtccttctataatattatggggtggaggggggtggtatggagcaaggggcaagttgggaagacaacctgtagggcctgcggggtctattgggaaccaagctggagtgcagtggcacaatcttggctcactgcaatctccgcctcctgggttcaagcgattctcctgcctcagcctcccgagttgttgggattccaggcatgcatgaccaggctcagctaatttttgtttttttggtagagacggggtttcaccatattggccaggctggtctccaactcctaatctcaggtgatctacccaccttggcctcccaaattgctgggattacaggcgtgaaccactgctcccttccctgtccttccttgcttgagagtgtggcactctcccccctgtcgcgttcgctcgctcgctggctcgtttgggggggtggcagctcaaagagctgccagacgacggccctctggccgtcgcccccccaaacgagccagcgagcgagcgaacgcgacaggggggagagggcctgattggccgtagatgtaccttgacatccaggtgatgccggcggcggtggtggaggcgcgagggaactcgcggacgcggttccagatgttgcgcagcggcaggaagtagttcatggtgggcacggtctggcccgtgaggcgcgcgcagtcgttgatgctctagacatacgggcaaaaacgaaagcggtcagcggctcgactccgtggcctggaggctaagcgaacgggttgggctgcgcgtgtaccccggttcgaatctcgaatcaggctggagccgcagctaacgtggtactggcactcccgtctcgacccaggcctgcacaaaacctccaggatacggaggcgggtcgttttgcaaatttttggcggtcgaaaaaagctagtaagcgcggaaagcggccgaccgcaatggctcactgccgtagattggagaagaatcgccagggttgcgttgcggtgtgccccggttcgagaccgctcgggtcggccgaattccgcggctaacgagggcgtggctgccccgtcgtttccaagaccccataagccagccgacttctccagttacggagcgagcccctcttttgttttgttttttgccagatgcatcccgtactgcggcagatgcgcccccaccctccaccgcaacagcagccccctcctacgcaacagccggcgcttctgcctccgccccagcagcagcccaggtggaacctaccctgcgccgcaaccaggaggcactctaccgcttcctcaactcccactctgcatactttcgctctcaccgcgcgcgcattgagaaggccaccgccttcgaccgcatgaatcaagacatgtaacagtgtgttttaaaatatgtttaataaacagcactttttatgtgacacatgcatttgagataattttattcttaaaaatcgaaggggttctgccgggaggtttcggcatggcccgcgggcagggacacgttgcggaactggtacttggccagccacttgaactcggggatcagcagtttcggcagcagggtgtcggggaacgagtcggtccacagcttccgcgtcagttgcagggcgcccagcaggtcgggcgcggagatcttgaaatcgcagttgggacccgcgttttgcgcgcgagagttgcggtacacagggttgcagcactggaacaccatcagggccggatgcttcacgctcgccagcaccgtagcgtcggtgatcccgtccacgtcgaggtcttcggcgttggccatcccgaagggggtcatcttgcaggtctgccggcccatggtgggcacgcagccgggcttgtggttgcaatcgcagtgcagggggatcagcatcatctgggcctggtcggcgttcatccccgggtacatggccttcatgaaagcctccagctgcttaaacgcctgctgggccttggctccctcggtgaagaagaccccgcaggacttgctagaaaactggttggtagcgcacccggcgtcgtgcacgcagcagcgcgcgtcgttgttggccagctgcaccacgctgcgcccccagcggttctgggtaatcttggcccggtcggggttctcctttagcgcgcgttgcccgttctcgcttgccacatccatctcgatcatgtgctccttctggatcatggtggtcccgtgcaggcaccgcagcttgccctcgacttcggtacagccgtgcagccacagcgcgcaccccgtgctctcccagttcttgtgggcgatctgggaatgcgcatgcacgaacccctgcaggaagcggcccatcatggtcgtcagggtcttgttactggtaaaggtcagcggaatgccgcggtgctcctcgttgatgtacaggtggcagatgcggcgatacacctcgccctgctcgggcatcagttggaagttggattttaggtcgctttccacacggtagcgctccatcagcatattcatgatttccatgcccttctcccaggccgatacaatgggcaggctcagggggttcgtcaccgccatcttagcgctagcagccttcgtcagcgggtcgttctcattgagagtctcaaagctccgcttgccgtccttctcggtgatccgcacgggggggtagctgaagcccacggccgccagctcctcctcggcctctctttcgtcctcgctgtcctggctgacgtcctgcaggggcacatgcttcgttttgcggggtttctttttgggcggctgctgcggcggcggtggttgttcctgaggcgagggggagcgcgagttctcgctcaccactactatctcttcttcttggtccgaggccacgcggcggtaggtatgtctcttcaggggcagaggcggaggcgacgggctctcgcggcccggcgggtggctggcagagccccttccgcgatcgggggtgcgctcccggcggcgctctaactgacttcctccgcggccggccattgtgttctcctagggaacaacaacaagcatggagactcagccatcgtcgccaacctcgccatctgcccccaccgccgacaagaagcagcagcagaatgagagcttaaccgccccgccgcccagccccgccacctttgtcgcggccccagacatgcaagagatggaggaatccattcagattgacctgggctatgtgacgcccgcggagcacgaggaggagcttgcagtgcgcttttcaacccaggaagagatacaccaagaacagccagagcaggaagcaaagagcgagcatgactacctccaccagagcgggggggaggacgccctcatcaagcatctggcccggcaggctatcatcgtcaaggacgcgctgcttgaccgcaccgaggtgcccctcagcgtggaggagctcagccgcgcctacgagctcaacctcttctcgccgcgcgtgccccccaagcgccagcccaacggcacctgcgagcccaacccacgcctcaacttctacccggtcttcgcggtgcccgaggccctggccacctaccacatctttttcaagaaccaaaggatccctgtctcctgtcgcgccaaccgcacccgcgccgactcccttttcaacctgggccccggtgcccgcctacctgatatcgcctccttggaagaggttcccaagatcttcgagggtctgggcagcgacgagactcgggccgcaaacgctctgcaaggagaaggaggagatcatgagcaccacagcgccctggtggagttggaaggcgacaacgcgcgtctggcggtgctcaagcgcacgatcgagctgacccatttcgcctacccggcgcttaacctgccccccaaagtcatgagcacggttatggaccaggtgctcatcaagcgcgcgtcgcccatctccaaggagatgcaagaccccgagagctccgaggagggcaagcccgtggtcagcgacgagcagctggcgcggtggctgggaccccaagctagtccccagagcttggaagagcggcgcaagctcataatggccgtggtcctggtgaccgcggagctggagtgtctgcgccgcttcttcgccgacgcagaaactctgcgcaaggtcgaggagaacctgcactacatcttcaggcacgggttcgtacgccaggcctgcaagatctccaacgtggagctgaccaacctggtctcctacatgggcatcttgcacgagaaccgcctggggcagaacgtgctgcacaccaccctgcgcggggaggcccgccgcgactacatccgcgactgcgtttacctctacctctgccacacctggcagacagccatgggcgtgtggcagcagtgtctggaggagcagaacctaaaagagctctgcaagctcctgcagaagaacctcaaggccctgtggaccgggttcgacgagcgcaccaccgcctcggacctggcagacctcattttccccgagcgtctcaggctgacgctgcgcaacggtttgcccgactttatgagtcaaagcatgttgcaaaactttcgctctttcatcctcgaacgctccgggatcctgccggccacctgctccgcgctgccctcggacttcgtgccgctgaccttccgcgagtgccccccgccgctgtggagccactgctacctgctgcgcttggccaactacctggcctaccactcggacgtgatcgaggacgtcagcagcgagggcctgctcgagtgccactgccgctgcaacctctgcacgccgcaccgctccctggcctgcaacccccagctgctgagcgagacccagatcatcggcaccttcgagttgcaagggcccggcgatgagggttctgccgccaaggggggtctgaaactcaccccggggctgtggacctcggcctacttgcgcaagttcgtgcccgaggactaccatcccttcgagatcaggttctacgaggaccaatcccagccgcccaaggccgagctgtcggcctgcgtcatcacccagggggcgatcctggcccaattgcaagctatccagaaatcccgccaagaattcttgctgaaaaagggccgcggggtctaccttgatccccagaccggtgaggagcttaaccccggcttcccccaggatgccccgaggaagcagcaagaagctgaaagtggagctgccgcccgtggaggatttggaggaagactgggagagcagtcaggcagaggaggaggagatggaagactgggacagcactcaggcagaggacagcctgcaagacagtctggaagacgaggaggaggcagaggaggtggaagaagtagccgccgccgccagaccgtcgtcctcggcggagaaagcaagcagcacggataccatctccgctccgggtcggggtcccgctcgaccccacagtagatgggacgagaccgggcgattcccgaaccccaccacccagaccggtaagaaggagcggcagggatacaagtcctggcgggggcacaaaaacgccatcgtctcctgcttgcaagcttgcgggggcaacatctcattcacccggcgctacctgctctttcaccgcggggtgaacttcccccgcaacatcttgcattactaccgtcacctccacagcccctactacttccaagaagaggcagaaaaagacaaaaccagcagctagaaaatccacagcggcggcggcaggtggactgaggatcgcggcgaacgagccggcgcagacccgggaactgaggaaccggatctttcccaccctctatgccatcttccagcagagtcgggggcaggagcaggaactgaaagtcaagaaccgttctctgcgctcgctcacccgcagttgtctgtatcacaagagcgaagaccaacttcagcgcacgcttgaggacgccgaggctctcttcaacaagtactgcgcactcactcttaaagagtagcccgcgcccgcccacacacggaaaaaggcgggaattacgtcacctgtgcacccccacccagcaccgctatgagcaaagaaattcccacgccttacatgtggagctaccagccccagatgggcctggccgccggcgccgcccaggactactccacccgcatgaattggctcagcgccgggcccgggatgatctcacgggtgaatgacatccgcgcccaccgaaaccagatactcctagaacagtcagcgctcaccgccacgccccgcaatcacctcaatccgcgtaattggcccgccgccctagtgtaccaggaaattccccagcccacgaccgtactacttccgcgagacgcccaggccgaagtccagctgactaactcaggtgtccagctggcgggcggcgccaccctgtgtcgtcaccaccccgctccaatgtcattttcatacacctggactaacggaagctatatcggagcaacatttggagctaactcatacaccttctcctacatagcccaacaataatcccaccctgcatgccaacccaccttttccctctatttataaatggaaactgaaacaaaaataaagttcaagtgttttattgattcaacagtttttcacaggattcgagtagttattttccctccaccctcccatctcatggaatacactatcctctccccacgcacagccttaaacatctgaatgctattggtaatggacatggttttgatctccacattccacacagtttcagagcgagacagtctcgggtcggtcaaggagatgaaaccctccgggcactcctgcatctgcacctcacagttcaacagctgagggctgtcctcggtgattggaatcacagttatctggaataagagcgatgagaatcataatccgcaaacgggatcgggcggttgtggcgcatcaggccccgcagcagtcgctgtctgcgccgctccgtcaagctgctactcaaggggtccgggtccagggactccctgcgcatgatgccaatggccctgagcatcagtcgcctggtacggcgggcgcagcagcggatgcggatctcactcaggtcggagcagtacgtgcagcacagcaccaccaagttgttcaacagtccatagttcaacgtgctccagccaaaactcatttgtggaactatgctgcccacatgtccatcgtaccagatcctgatgtaaatcaggtggcgtcccctccagaacacactgcccatgtacatgatctccttgggcatgtgcaggttcaccacctcccggtaccacatcacccgctggttgaacatgcagccctggataattctgcggaaccagatggcaagtaccgtcccgcccgccatgcagcgcagggaccccgggttctggcaatggcagtggatcacccaccgctcgcgaccgtggatcaactgggaactaaacaagtctatgttggcacagcacaggcacacgctcatgcatgtcttcagcactctcaattcctcgggggtcaggaccatatcccagggcacagggaactcttgcaggacagtgaacccggccgaacagggcaatcctcgcacggaacttacattgtgcatggacagggtatcgcaatcaggcagcaccggatgatcctccaccagagaagcgcggctctcggtctcctcacagcgaggtaaggtggccggcggttggtacggatgatggcgagataacgctaatcgtgttctggatcgtgtcatgatggagctgtttccggacattttcgtatttcacaaagcagaacctggtccgggcactgcacaccgctcgtcggcgacggtctcggcgcttcgagcgctcaatgttgaagttatagaacagccactccctcagaacgtgcagtatctcctgagcctcttgggtgatgaaaatcccatccgccctgatggctctgattacatcaaccacggtggaatgggccaaacccagccagatgatgcaattttgttgggtttcggtgacggcgggggagggaagaacaggaagaaccatgattaactttattccaaacggtctcggaacacttcaaaatgcaggtcccggaggtggcacctctcgcccccactgtgttggtggaaaataacagccaggtcaaaggtaacacggttctcgagatgttccacggtggcttccagcaaagcctccacgcgcacatccagaaacaagaggacagcgaaagcgggagcgttttctaattcctcaatcatcatattacactcctgcaccatgcctagataattttcatttttccagccttgaatgattcgtattagttcctgaggtaaatccaagccagccatgataaaaagctcgcgcagagcgccctccaccggcattcttaagcacaccctcataattccaacagattctgctcctggttcacctgtagtagattaacaagtggaatatcaattgctctgccgcaatccctaagctcctcccttagcagtaactgtatgtactcattcatatcttctccgaaatttttagccataggaccaccaggaacaagagaagggcaagccacattacagataaagcgaagtcctccccagtgagcattgccaaatgtaagattgaaataagcatgctggctagacccggtgatatcttccagataactggacagaaaatcaggcaagcaatttttaagaaaattaacaaaagaaaagtcgtctaggtgcacgtttagagcctcaggaacaacgatggaataagtgcaaggagtacgttccagcatggttagtgtttttggtgatctgtagaacaaaaaataaacatgcaatattaaaccatgctagcctggcgaacaggtggataaatcactctttccaacaccaggcaggctacagggtctccggcgcgaccattgtagaagctgacattatgattaaaaagcatcaccgacagaccttcccggtggccggcatggatgattcgagaagaagcatacactccgggaacattggcgtccgtgagtgaaaaaaagcgacctataaagccttgaggcactacaatgcttaatcttaattccagcaaagcgaccccatgcggatgaagcacaaaattggcaggtgcgtaaaaaatgtaattactccccttctgcacaggcagcaaagcccccgctccctccagaaacacatacaaaacctgagcgtccatagcttaccgagcacggcaggcgcaagagtcagagaaaaagctgagctctaacctaactgcccgcttctgtactcaatatatagccctaacctcactgacgtaaaggccaaggtctaaaaatacccgccaacacgcccagaaaccggtgacacactaaaaaaatacgtgcacttcctcaaacgcccaaactggcgtcatttccggtttcccacgctacgtcacctctcaacgactttcaaattccgtcgaccgttaaacacatcagttaggcctatgtggccgggttttgtaagcagtgatgtcataatgatgtaatgcttattgtcacgcgatagttaatgattaacagtcatgtgatgtgttttatccaataggaagaaagcgcgcgtatgagttctcgcgagacttccggggtataaaagaccgagtgaacgagcccgccgccattctttgctctggactgctagaggaccctcgctgccatggctaccttctatgaagtcattgttcgcgtcccatttgacgtggaggaacatctgcctggaatttctgacagctttgtggactgggtaactggtcaaatttgggagctgcctccagagtcagatttaaatttgactctggttgaacagcctcagttgacggtggctgatagaattcgccgcgtgttcctgtacgagtggaacaaattttccaagcaggagtccaaattctttgtgcagtttgaaaagggatctgaatattttcatctgcacacgcttgtggagacctccggcatctcttccatggtcctcggccgctacgtgagtcagattcgcgcccagctggtgaaagtggtcttccagggaattgaaccccagatcaacgactgggtcgccatcaccaaggtaaagaagggcggagccaataaggtggtggattctgggtatattcccgcctacctgctgccgaaggtccaaccggagcttcagtgggcgtggacaaacctggacgagtataaattggccgccctgaatctggaggagcgcaaacggctcgtcgcgcagtttctggcagaatcctcgcagcgctcgcaggaggcggcttcgcagcgtgagttctcggctgacccggtcatcaaaagcaagacttcccagaaatacatggcgctcgtcaactggctcgtggagcacggcatcacttccgagaagcagtggatccaggaaaatcaggagagctacctctccttcaactccaccggcaactctcggagccagatcaaggccgcgctcgacaacgcgaccaaaattatgagtctgacaaaaagcgcggtggactacctcgtggggagctccgttcccgaggacatttcaaaaaacagaatctggcaaatttttgagatgaatggctacgacccggcctacgcgggatccatcctctacggctggtgtcagcgctccttcaacaagaggaacaccgtctggctctacggacccgccacgaccggcaagaccaacatcgcggaggccatcgcccacactgtgcccttttacggctgcgtgaactggaccaatgaaaactttccctttaatgactgtgtggacaaaatgctcatttggtgggaggagggaaagatgaccaacaaggtggttgaatccgccaaggccatcctggggggctcaaaggtgcgggtcgatcagaaatgtaaatcctctgttcaaattgattctacccctgtcattgtaacttccaatacaaacatgtgtgtggtggtggatgggaattccacgacctttgaacaccagcagccgctggaggaccgcatgttcaaatttgaactgactaagcggctcccgccagattttggcaagattactaagcaggaagtcaaggacttttttgcttgggcaaaggtcaatcaggtgccggtgactcacgagtttaaagttcccagggaattggcgggaactaaaggggcggagaaatctctaaaacgcccactgggtgacgtcaccaatactagctataaaagtctggagaagcgggccaggctctcatttgttcccgagacgcctcgcagttcagacgtgactgttgatcccgctcctctgcgaccgctcaattggaattcaaggtatgattgcaaatgtgactatcatgctcaatttgacaacatttctaacaaatgtgatgaatgtgaatatttgaatcggggcaaaaatggatgtatctgtcacaatgtaactcactgtcaaatttgtcatgggattcccccctgggaaaaggaaaacttgtcagattttggggattttgacgatgccaataaagaacagtaaataaagcgagtagtcggcctctatggccatggctgccgatggttatcttccagattggctcgaggacactctctctgaaggaataagacagtggtggaagctcaaacctggcccaccaccaccaaagcccgcagagcggcataaggacgacagcaggggtcttgtgcttcctgggtacaagtacctcggacccttcaacggactcgacaagggagagccggtcaacgaggcagacgccgcggccctcgagcacgacaaagcctacgaccggcagctcgacagcggagacaacccgtacctcaagtacaaccacgccgacgcggagtttcaggagcgccttaaagaagatacgtcttttgggggcaacctcggacgagcagtcttccaggcgaaaaagagggttcttgaacctctgggcctggttgaggaacctgttaagacggctccgggaaaaaagaggccggtagagcactctcctgtggagccagactcctcctcgggaaccggaaaggcgggccagcagcctgcaagaaaaagattgaattttggtcagactggagacgcagactcagtacctgacccccagcctctcggacagccaccagcagccccctctggtctgggaactaatacgatggctacaggcagtggcgcaccaatggcagacaataacgagggcgccgacggagtgggtaattcctcgggaaattggcattgcgattccacatggatgggcgacagagtcatcaccaccagcacccgaacctgggccctgcccacctacaacaaccacctctacaaacaaatttccagccaatcaggagcctcgaacgacaatcactactttggctacagcaccccttgggggtattttgacttcaacagattccactgccacttttcaccacgtgactggcaaagactcatcaacaacaactggggattccgacccaagagactcaacttcaagctctttaacattcaagtcaaagaggtcacgcagaatgacggtacgacgacgattgccaataaccttaccagcacggttcaggtgtttactgactcggagtaccagctcccgtacgtcctcggctcggcgcatcaaggatgcctcccgccgttcccagcagacgtcttcatggtgccacagtatggatacctcaccctgaacaacgggagtcaggcagtaggacgctcttcattttactgcctggagtactttccttctcagatgctgcgtaccggaaacaactttaccttcagctacacttttgaggacgttcctttccacagcagctacgctcacagccagagtctggaccgtctcatgaatcctctcatcgaccagtacctgtattacttgagcagaacaaacactccaagtggaaccaccacgcagtcaaggcttcagttttctcaggccggagcgagtgacattcgggaccagtctaggaactggcttcctggaccctgttaccgccagcagcgagtatcaaagacatctgcggataacaacaacagtgaatactcgtggactggagctaccaagtaccacctcaatggcagagactctctggtgaatccgggcccggccatggcaagccacaaggacgatgaagaaaagttttttcctcagagcggggttctcatctttgggaagcaaggctcagagaaaacaaatgtggacattgaaaaggtcatgattacagacgaagaggaaatcaggacaaccaatcccgtggctacggagcagtatggttctgtatctaccaacctccagagaggcaacagacaagcagctaccgcagatgtcaacacacaaggcgttcttccaggcatggtctggcaggacagagatgtgtaccttcaggggcccatctgggcaaagattccacacacggacggacattttcacccctctcccctcatgggtggattcggacttaaacaccctcctccacagattctcatcaagaacaccccggtacctgcgaatccttcgaccaccttcagtgcggcaaagtttgcttccttcatcacacagtactccacgggacaggtcagcgtggagatcgagtgggagctgcagaaggaaaacagcaaacgctggaatcccgaaattcagtacacttccaactacaacaagtctgttaatgtggactttactgtggacactaatggcgtgtattcagagcctcgccccattggcaccagatacctgactcgtaatctgttgcttgttaatcaataaaccgtttaattcgtttcagttgaactttggtctctgcgtatttctttcttatctagtttccatggctacgtagataagtagcatggcgggttaatcattaactacagcccgggcgtttaaacagcgggcggaggggtggagtcgtgacgtgaattacgtcatagggttagggaggtcctgtattagaggtcacgtgagtgttttgcgacattttgcgacaccatgtggtctcgctgggggggggggcccgagtgagcacgcagggtctccattttgaagcgggaggtttgaacgcggccgcaaaaggccttcttggccaccccgggccgtcgaccaattctcatgtttgacagcttatcatcgaatttctgccattcatccgcttattatcacttattcaggcgtagcaaccaggcgtttaagggcaccaataactgccttaaaaaaattacgccccgccctgccactcatcgcagtactgttgtaattcattaagcattctgccgacatggaagccatcacaaacggcatgatgaacctgaatcgccagcggcatcagcaccttgtcgccttgcgtataatatttgcccatggtgaaaacgggggcgaagaagttgtccatattggccacgtttaaatcaaaactggtgaaactcacccagggattggctgagacgaaaaacatattctcaataaaccctttagggaaataggccaggttttcaccgtaacacgccacatcttgcgaatatatgtgtagaaactgccggaaatcgtcgtggtattcactccagagcgatgaaaacgtttcagtttgctcatggaaaacggtgtaacaagggtgaacactatcccatatcaccagctcaccgtctttcattgccatacggaattccggatgagcattcatcaggcgggcaagaatgtgaataaaggccggataaaacttgtgcttatttttctttacggtctttaaaaaggccgtaatatccagctgaacggtctggttataggtacattgagcaactgactgaaatgcctcaaaatgttctttacgatgccattgggatatatcaacggtggtatatccagtgatttttttctccattttagcttccttagctcctgaaaatctcgataactcaaaaaatacgcccggtagtgatcttatttcattatggtgaaagttggaacctcttacgtgccgatcaacgtctcattttcgccaaaagttggcccagggcttcccggtatcaacagggacaccaggatttatttattctgcgaagtgatcttccgtcacaggtatttattcgcgataagctcatggagcggcgtaaccgtcgcacaggaaggacagagaaagcgcggatctgggaagtgacggacagaacggtcaggacctggattggggaggcggttgccgccgctgctgctgacggtgtgacgttctctgttccggtcacaccacatacgttccgccattcctatgcgatgcacatgctgtatgccggtataccgctgaaagttctgcaaagcctgatgggacataagtccatcagttcaacggaagtctacacgaaggtttttgcgctggatgtggctgcccggcaccgggtgcagtttgcgatgccggagtctgatgcggttgcgatgctgaaacaattatcctgagaataaatgccttggcctttatatggaaatgtggaactgagtggatatgctgtttttgtctgttaaacagagaagctggctgttatccactgagaagcgaacgaaacagtcgggaaaatctcccattatcgtagagatccgcattattaatctcaggagcctgtgtagcgtttataggaagtagtgttctgtcatgatgcctgcaagcggtaacgaaaacgatttgaatatgccttcaggaacaatagaaatcttcgtgcggtgttacgttgaagtggagcggattatgtcagcaatggacagaacaacctaatgaacacagaaccatgatgtggtctgtccttttacagccagtagtgctcgccgcagtcgagcgacagggcgaagccctcgagtgagcgaggaagcaccagggaacagcacttatatattctgcttacacacgatgcctgaaaaaacttcccttggggttatccacttatccacggggatatttttataattattttttttatagtttttagatcttcttttttagagcgccttgtaggcctttatccatgctggttctagagaaggtgttgtgacaaattgccctttcagtgtgacaaatcaccctcaaatgacagtcctgtctgtgacaaattgcccttaaccctgtgacaaattgccctcagaagaagctgttttttcacaaagttatccctgcttattgactcttttttatttagtgtgacaatctaaaaacttgtcacacttcacatggatctgtcatggcggaaacagcggttatcaatcacaagaaacgtaaaaatagcccgcgaatcgtccagtcaaacgacctcactgaggcggcatatagtctctcccgggatcaaaaacgtatgctgtatctgttcgttgaccagatcagaaaatctgatggcaccctacaggaacatgacggtatctgcgagatccatgttgctaaatatgctgaaatattcggattgacctctgcggaagccagtaaggatatacggcaggcattgaagagtttcgcggggaaggaagtggttttttatcgccctgaagaggatgccggcgatgaaaaaggctatgaatcttttccttggtttatcaaacgtgcgcacagtccatccagagggctttacagtgtacatatcaacccatatctcattcccttctttatcgggttacagaaccggtttacgcagtttcggcttagtgaaacaaaagaaatcaccaatccgtatgccatgcgtttatacgaatccctgtgtcagtatcgtaagccggatggctcaggcatcgtctctctgaaaatcgactggatcatagagcgttaccagctgcctcaaagttaccagcgtatgcctgacttccgccgccgcttcctgcaggtctgtgttaatgagatcaacagcagaactccaatgcgcctctcatacattgagaaaaagaaaggccgccagacgactcatatcgtattttccttccgcgatatcacttccatgacgacaggatagtctgagggttatctgtcacagatttgagggtggttcgtcacatttgttctgacctactgagggtaatttgtcacagttttgctgtttccttcagcctgcatggattttctcatactttttgaactgtaatttttaaggaagccaaatttgagggcagtttgtcacagttgatttccttctctttcccttcgtcatgtgacctgatacgcgtgctaccttaagagagtcaattcgcccttcccggtcgatatgaacagcttatttacataattcacgttattggtagttataaatgaaattcctaatatcggttatgaagtgaaattgaatttctacttgatctttctctctatttttgtaaaataaaattaagaatatttaaatattcaatgattcatttttgcagaaatcggaggaagaagaatatatgaaaacatttaacatttctcaacaagatccccccatattgttgtataagtgatgaaatactgaatttaaaacttagtttatatgtggtaaaatgttttaatcaagtttaggaggaattaattatgaagtgtaatgaataatgaatgtaacagggttcaattaaaagagggaagcgtatcattaaccctataaactacgtctgccctcattattggagggtgaaatgtgaatacatcctattcacaatcgaatttacgacacaaccaaattttaatttggctttgcattttatctttttttagcgtattaaatgaaatggttttgaacgtctcattacctgatattgcaaatgattttaataaaccaccagcgagtacaaactgggtgaacacagcctttatgttaaccttttccattggaacagctgtatatggaaagctatctgatcaattaggcatcaaaaggttactcctatttggaattataataaattgtttcgggtcggtaattgggtttgttggccattctttcttttccttacttattatggctcgttttattcaaggggctggtgcagctgcatttccagcactcgtaatggttgtagttgcgcgctatattccaaaggaaaataggggtaaagcatttggtcttattggatcgatagtagccatgggagaaggagtcggtccagcgattggtggaatgatagcccattatattcattggtcctatcttctactcattcctatgataacaattatcactgttccgtttcttatgaaattattaaagaaagaagtaaggataaaaggtcattttgatatcaaaggaattatactaatgtctgtaggcattgtattttttatgttgtttacaacatcatatagcatttcttttcttatcgttagcgtgctgtcattcctgatatttgtaaaacatatcaggaaagtaacagatccttttgttgatcccggattagggaaaaatataccttttatgattggagttctttgtgggggaattatatttggaacagtagcagggtttgtctctatggttccttatatgatgaaagatgttcaccagctaagtactgccgaaatcggaagtgtaattattttccctggaacaatgagtgtcattattttcggctacattggtgggatacttgttgatagaagaggtcctttatacgtgttaaacatcggagttacatttctttctgttagctttttaactgcttcctttcttttagaaacaacatcatggttcatgacaattataatcgtatttgttttaggtgggctttcgttcaccaaaacagttatatcaacaattgtttcaagtagcttgaaacagcaggaagctggtgctggaatgagtttgcttaactttaccagctttttatcagagggaacaggtattgcaattgtaggtggtttattatccatacccttacttgatcaaaggttgttacctatggaagttgatcagtcaacttatctgtatagtaatttgttattacttttttcaggaatcattgtcattagttggctggttaccttgaatgtatataaacattctcaaagggatttctaaatcgttaagggatcaactttgggagagagttcaaaattgatcctttttttataacaggaattgggcatcaaataaaacgaaaggctcagtcgaaagactgggcctttcgttttatctgttgtttgtcggtgaacgctctcctgagtaggacaaatccgccgggagcggatttgaacgttgcgaagcaacggcccggagggtggcgggcaggacgcccgccataaactgccaggcatcaaattaagcagaaggccatcctgacggatggcctttttgcgtttctacaaactcttcctgtcgtcatatctacaattctacacagcccagtccagactattcggcactgaaattatgggtgaagtggtcaagacctcactaggcaccttaaaaatagcgcaccctgaagaagatttatttgaggtagcccttgcctacctagcttccaagaaagatatcctaacagcacaagagcggaaagatgttttgttctacatccagaacaacctctgctaaaattcctgaaaaattttgcaaaaagttgttgactttatctacaaggtgtggcataatgtgtggaattgtgagcggataacaattaagctaattctatggtaaaagcattcctgaacccaatatccttatttttagtggacaaggccttgttctcatatggttgcttgagccagtgccttacaaggctcttccgctttggcaggctgttcaaaattatttattagagcaactcaaggaactaggcggagatccaaaagcaaccgatgcagcacgtgtttttcggattgctgggagcgtcaatagtaagaatggagcggaagtaagagcggaatatcggcacgattacagatatgagttaaggcagattcaatttgattaccttccagaactcaatgaggttattaatcccgctccacaaaagaaaaaacgggggcgtaaaaagaaagtagttcagttattcaatacctacaaactccattacgctcgcctattggatatagtgaaattggtggaactacgaaattatgaggtaactggatacagggaaatcatttgctttttataccgttattggttgtgctgttacacgaacgaccctgtagaggctttaaatcaaacacagacacttaatttacagttcactgagcctttacccttaaaagaggttgaaagggctacacggagcgcagaaaaggcgtgggaagcacgaaataacgaagaggctaaccggattgcaatcgaaaaaggatatcccagtgctggatacaatattagcaataaaaagttgattgaatggctagatatcacaccagaagaacagaagcatttacagacgattatagacgctaatgagaaacggagaagaaagcgggaaagggataggatttatcaagaacaaaaacgtcgtgagcggggagatatgacccgacaggagtatattaagcaacaacaggataaaacagatgataaattatttaaattgcaggagttattagaacagaatcccaaaatctcaaaaattaaattagcaaaaatacttggtgtagataaatcgcacttatacagactgctgaaacaactataactggaaaaaattagtgtctcatggttcgtcgcccttatattatgggcgttagcctgcttgctaattggataggtgttattgtcatttcaacgtcggacgttttggtagatgaacgtcggacgttatttgcttcaatagattgttgatgtattaagggttgcagtgaatcgacaagcaaaaagttatgacgttgtgaaaaaattgaatagaaaattggaaattacgtcggacgttctaacttaaaaaccctgttatatcaatgatttaaaaggaaattaacgtcataaaagacctttctgcaacaaaagtttttctggaagagttgaggttattttataggtattatggacttttgtagactttttgtgtactttttgtggactccacactcgctggtatcgtgttattttttaattgagatatgaatatggaaattaaacgttttaggcgttggtttggtgatgacaaaaaaataagagtacccgctcacaacggatactctttcgagaaatgtacgaaacgctataaataaaaaataactagatacatttacattgtatcacgtttcgtacatttctccaataacaaattgattggaggaatgcaaagtgaataatgaaccagtaaaacgtggtaagaagaacagatgggaattaaacctacctataatgacttatgtagtagctgatgattggattgataaactaggacacgaaacgtttactttatggttgaggttccatacttgggtagatagagaagatgaactccgagattatgatcgcatacctagaagttttgagaacatatataaaaagacactaggaatctcaaaaagtaagttttatagattgataaaacctttatgggaatatggattaatagacatcatagaatacgaagaatctaaccgtaattctactaaacctaaaaatataattgtttatgagtatcctttacacgaaatagaaagaaagtataaaccactagaaaaattaagagattgggataaagactataattccgtttctaaagaattaggtaaaacaggtggtagaccaaggaaaaaagatagtgaagaagaacccgaaaagaaacccgaagaagtaactaaaaagaaacgtaaatataagttaaaaagagttatccacaacggtttcaaaaatgaaacggtggagggtttcaaaaatgaaacggtggagggtttcaaaaatgaaacggtgaccgtttcaaaaataaaacccaataattattcaaatatctttaataacttatcaaatatttctactaatgtttcaaataatttattaattgatgatgatgaggaaatcgaaaatgaaccaactggtcgtacaataaataggtcattacttttttcacaagaagatattaaacaggcctatcaatttattaatagattttcagttatacagttacgtgaaaactttagctttgataaacactttgaagaacggttggtatgttatttatggaaagcagggatttctactttttacacgcacgaaatcagtaaaatgataaaaaaaatagcagactatgaaaaatctaaaaaaggtagattaaacccaatacgtgaccgagccttatatatggtaaatggtcttgtaatgaatagagcttcttcccaaagtgaacatgctacttataaactaaaccaatataaaaaacagaaggaacaggaaaaacaacaacaggagcaacaaagatcaagagtaccgttctataattggttggaggaaagagaagaacaaaccgaaggtcaactacccaccacttaaagcctaacggcttttgaagtggggcttgtaaaaagccctagttgactaccccaagtctttcgaggactacgttggaaaggtcatgacacctacaaatgctcctctagttcgtagccactgtcgttgatggttaaaagtcctgatgggtagggacggtgctgtcaacatcacaagcccttccaacatgggggaagaggaagaacactccgagaaaggagggggctgtcgtacacgccttgttcgtgtacgtgatttttaacacttttatctctaatataatctctccttgagttagcagagactaagaataaaacacattaggattttttatctacataaggaggttcaatacatgcctactatttcgtttaagggaaagtcttttgtacaaaatcatcacttgactgtaaaatatcatgaattgatcccagaaccagaaaaaagtctgaccgataaagttagtcttcatgacaatcttatcattcatggggacaatttaaaggcgttgaaagctctactacctacatatgctggtaagatagattgcatctatattgacccaccatacaatactggaactgaaaaatggatttataatgataatgtcaactccccaatgattagggaatggcttggaaaagtggtagacaaagaagacttatcccgacatgataagtggctttgtatgatgatgccgaggttaaaactgttgaaagagttgttgtcagaagacggagtgatatttgtaagcattgactacaatgaaatacaccatcttacgtgccttatgaacgaaatattcggtgaggagaattttcgtgacgctattatcattcgtagaggagtaaaaaatgttcaagcgcaatttgacacaattgattctctttcaaatggttatgagtctattttggtttacactaaacagccatctcgacgatttaataaggtttatgaagatgtagaagaaaagcctggtagttggaataatcattggagaggtacagaccgtaaaactatgagatatgaattatttggggttactccgacagaaggtcaatggagatgggggaaagaacgtagtctccaggctattgaaaactatcaaatgatgttagatgaacttagacaaaaaggcattactaatccaactcaagaggatattgataaatggtatcttgaatatgtagaaaataatggggaagatattgacttgttacgacaaaatgataatggcacgattgagcactttgttccaccgactagcaaaaagttgttaagtaatgcctggtttgacttaaaacccaacggttctagtcaattaaagaagatatttggaaggaaggttttcgataaccctaaatcaattgatttggtaaaaagactaatacaatttgcgactgaaaacaaagaagcgattgtacttgactcatttgcagggagtggcactactgctcatgcagtattatcgcttaacaaacaagatggagggaatcgtcgtttcatccttattgagatggaagaatatgcacatgagattaccgcagaacgcggatctttatcgatttgcatgcaagctaattcggtggaaacgaggtcatcatttccttccgaaaaaacggttgcatttaaatcttacatatgtaatactttcaaagactacatttgtaagatttgatgtttgagtcggctgaaagatcgtacgtaccaattattgtttcgtgattgttcaagccataacactgtagggatagtggaaagagtgcttcatctggttacgatcaatcaaatattcaaacggagggagacgattttgatgaaaccagtaacgttatacgatgtcgcagagtatgccggtgtctcttatcagaccgtttcccgcgtggtgaaccaggccagccacgtttctgcgaaaacgcgggaaaaagtggaagcggcgatggcggagctgaattacattcccaaccgcgtggcacaacaactggcgggcaaacagtcgttgctgattggcgttgccacctccagtctggccctgcacgcgccgtcgcaaattgtcgcggcgattaaatctcgcgccgatcaactgggtgccagcgtggtggtgtcgatggtagaacgaagcggcgtcgaagcctgtaaaacggcggtgcacaatcttctcgcgcaacgcgtcagtgggctgatcattaactatccgctggatgaccaggatgccattgctgtggaagctgcctgcactaatgttccggcgttatttcttgatgtctctgaccagacacccatcaacagtattattttctcccatgaagacggtacgcgactgggcgtggagcatctggtcgcattgggtcaccagcaaatcgcgctgttagcgggcccattaagttctgtctcggcgcgtctgcgtctggctggctggcataaatatctcactcgcaatcaaattcagccgatagcggaacgggaaggcgactggagtgccatgtccggttttcaacaaaccatgcaaatgctgaatgagggcatcgttcccactgcgatgctggttgccaacgatcagatggcgctgggcgcaatgcgcgccattaccgagtccgggctgcgcgttggtgcggatatctcggtagtgggatacgacgataccgaagacagctcatgttatatcccgccgttaaccaccatcaaacaggattttcgcctgctggggcaaaccagcgtggaccgcttgctgcaactctctcagggccaggcggtgaagggcaatcagctgttgcccgtctcactggtgaaaagaaaaaccaccctggcgcccaatacgcaaaccgcctctccccgcgcgttggccgattcattaatgcagctggcacgacaggtttcccgactggaaagcgggcagtgagcgcaacgcaattaatgtgagttaggatcgctaccttaagagagacgcgttatcgggggttagttcgtcatcattgatgagggttgattatcacagtttattactctgaattggctatccgcgtgtgtacctctacctggagtttttcccacggtggatatttcttcttgcgctgagcgtaagagctatctgacagaacagttcttctttgcttcctcgccagttcgctcgctatgctcggttacacggctgcggcgagcgctagtgataataagtgactgaggtatgtgctcttcttatctccttttgtagtgttgctcttattttaaacaactttgcggttttttgatgactttgcgattttgttgttgctttgcagtaaattgcaagatttaataaaaaaacgcaaagcaatgattaaaggatgttcagaatgaaactcatggaaacacttaaccagtgcataaacgctggtcatgaaatgacgaaggctatcgccattgcacagtttaatgatgacagcccggaagcgaggaaaataacccggcgctggagaataggtgaagcagcggatttagttggggtttcttctcaggctatcagagatgccgagaaagcagggcgactaccgcacccggatatggaaattcgaggacgggttgagcaacgtgttggttatacaattgaacaaattaatcatatgcgtgatgtgtttggtacgcgattgcgacgtgctgaagacgtatttccaccggtgatcggggttgctgcccataaaggtggcgtttacaaaacctcagtttctgttcatcttgctcaggatctggctctgaaggggctacgtgttttgctcgtggaaggtaacgacccccagggaacagcctcaatgtatcacggatgggtaccagatcttcatattcatgcagaagacactctcctgcctttctatcttggggaaaaggacgatgtcacttatgcaataaagcccacttgctggccggggcttgacattattccttcctgtctggctctgcaccgtattgaaactgagttaatgggcaaatttgatgaaggtaaactgcccaccgatccacacctgatgctccgactggccattgaaactgttgctcatgactatgatgtcatagttattgacagcgcgcctaacctgggtatcggcacgattaatgtcgtatgtgctgctgatgtgctgattgttcccacgcctgctgagttgtttgactacacctccgcactgcagtttttcgatatgcttcgtgatctgctcaagaacgttgatcttaaagggttcgagcctgatgtacgtattttgcttaccaaatacagcaatagtaatggctctcagtccccgtggatggaggagcaaattcgggatgcctggggaagcatggttctaaaaaatgttgtacgtgaaacggatgaagttggtaaaggtcagatccggatgagaactgtttttgaacaggccattgatcaacgctcttcaactggtgcctggagaaatgctctttctatttgggaacctgtctgcaatgaaattttcgatcgtctgattaaaccacgctgggagattagataatgaagcgtgcgcctgttattccaaaacatacgctcaatactcaaccggttgaagatacttcgttatcgacaccagctgccccgatggtggattcgttaattgcgcgcgtaggagtaatggctcgcggtaatgccattactttgcctgtatgtggtcgggatgtgaagtttactcttgaagtgctccggggtgatagtgttgagaagacctctcgggtatggtcaggtaatgaacgtgaccaggagctgcttactgaggacgcactggatgatctcatcccttcttttctactgactggtcaacagacaccggcgttcggtcgaagagtatctggtgtcatagaaattgccgatgggagtcgccgtcgtaaagctgctgcacttaccgaaagtgattatcgtgttctggttggcgagctggatgatgagcagatggctgcattatccagattgggtaacgattatcgcccaacaagtgcttatgaacgtggtcagcgttatgcaagccgattgcagaatgaatttgctggaaatatttctgcgctggctgatgcggaaaatatttcacgtaagattattacccgctgtatcaacaccgccaaattgcctaaatcagttgttgctcttttttctcaccccggtgaactatctgcccggtcaggtgatgcacttcaaaaagcctttacagataaagaggaattacttaagcagcaggcatctaaccttcatgagcagaaaaaagctggggtgatatttgaagctgaagaagttatcactcttttaacttctgtgcttaaaacgtcatctgcatcaagaactagtttaagctcacgacatcagtttgctcctggagcgacagtattgtataagggcgataaaatggtgcttaacctggacaggtctcgtgttccaactgagtgtatagagaaaattgaggccattcttaaggaacttgaaaagccagcaccctgatgcgaccacgttttagtctacgtttatctgtctttacttaatgtcctttgttacaggccagaaagcataactggcctgaatattctctctgggcccactgttccacttgtatcgtcggtctgataatcagactgggaccacggtcccactcgtatcgtcggtctgattattagtctgggaccacggtcccactcgtatcgtcggtctgattattagtctgggaccacggtcccactcgtatcgtcggtctgataatcagactgggaccacggtcccactcgtatcgtcggtctgattattagtctgggaccatggtcccactcgtatcgtcggtctgattattagtctgggaccacggtcccactcgtatcgtcggtctgattattagtctggaaccacggtcccactcgtatcgtcggtctgattattagtctgggaccacggtcccactcgtatcgtcggtctgattattagtctgggaccacgatcccactcgtgttgtcggtctgattatcggtctgggaccacggtcccacttgtattgtcgatcagactatcagcgtgagactacgattccatcaatgcctgtcaagggcaagtattgacatgtcgtcgtaacctgtagaacggagtaacctcggtgtgcggttgtatgcctgctgtggattgctgctgtgtcctgcttatccacaacattttgcgcacggttatgtggacaaaatacctggttacccaggccgtgccggcacgttaaccgggctgcatccgatgcaagtgtgtcgctgtcgacgagctcgcgagctcggacatgaggttgccccgtattcagtgtcgctgatttgtattgtctgaagttgtttttacgttaagttgatgcagatcaattaatacgatacctgcgtcataattgattatttgacgtggtttgatggcctccacgcacgttgtgatatgtagatgataatcattatcactttacgggtcctttccggtgatccgacaggttacggggcggcgacctcgcgggttttcgctatttatgaaaattttccggtttaaggcgtttccgttcttcttcgtcataacttaatgtttttatttaaaataccctctgaaaagaaaggaaacgacaggtgctgaaagcgagctttttggcctctgtcgtttcctttctctgtttttgtccgtggaatgaacaatggaagtccgagctcatcgctaataacttcgtatagcatacattatacgaagttatattcgat

SEQ ID NO: 166 - DNA, 29848 bp, synthetic construct
  misc_feature 1..29848: note = seed plasmid 7
  source 1..29848: mol_type = other DNA
gcggccgcttggccactccctctctgcgcgctcgctcgctcactgaggccgggcgaccaaaggtcgcccgacgcccgggctttgcccgggcggcctcagtgagcgagcgagcgcgcagagagggagtggccaactccatcactaggggtggccttgatggccaattcgattcgattagggcctacttggcctaatagtaatcaattacggggtcattagttcatagcccatatatggagttccgcgttacataacttacggtaaatggcccgcctggctgaccgcccaacgacccccgcccattgacgtcaataatgacgtatgttcccatagtaacgccaatagggactttccattgacgtcaatgggtggagtatttacggtaaactgcccacttggcagtacatcaagtgtatcatatgccaagtacgccccctattgacgtcaatgacggtaaatggcccgcctggcattatgcccagtacatgaccttatgggactttcctacttggcagtacatctacgtattagtcatcgctattaccatggtgatgcggttttggcagtacatcaatgggcgtggatagcggtttgactcacggggatttccaagtctccaccccattgacgtcaatgggagtttgttttggcaccaaaatcaacgggactttccaaaatgtcgtaacaactccgccccattgacgcaaatgggcggtaggcgtgtacggtgggaggtctatataagcagagctggtttagtgaaccgtcagatgccaccatggtgagcaagggcgaggagctgttcaccggggtggtgcccatcctggtcgagctggacggcgacgtaaacggccacaagttcagcgtgtccggcgagggcgagggcgatgccacctacggcaagctgaccctgaagttcatctgcaccaccggcaagctgcccgtgccctggcccaccctcgtgaccaccctgacctacggcgtgcagtgcttcagccgctaccccgaccacatgaagcagcacgacttcttcaagtccgccatgcccgaaggctacgtccaggagcgcaccatcttcttcaaggacgacggcaactacaagacccgcgccgaggtgaagttcgagggcgacaccctggtgaaccgcatcgagctgaagggcatcgacttcaaggaggacggcaacatcctggggcacaagctggagtacaactacaacagccacaacgtctatatcatggccgacaagcagaagaacggcatcaaggtgaacttcaagatccgccacaacatcgaggacggcagcgtgcagctcgccgaccactaccagcagaacacccccatcggcgacggccccgtgctgctgcccgacaaccactacctgagcacccagtccgccctgagcaaagaccccaacgagaagcgcgatcacatggtcctgctggagttcgtgaccgccgccgggatcactctcggcatggacgagctgtacaagtaagggtggcatccctgtgacccctccccagtgcctctcctggccctggaagttgccactccagtgcccaccagccttgtcctaataaaattaagttgcatcattttgtctgactaggtgtccttctataatattatggggtggaggggggtggtatggagcaaggggcaagttgggaagacaacctgtagggcctgcggggtctattgggaaccaagctggagtgcagtggcacaatcttggctcactgcaatctccgcctcctgggttcaagcgattctcctgcctcagcctcccgagttgttgggattccaggcatgcatgaccaggctcagctaatttttgtttttttggtagagacggggtttcaccatattggccaggctggtctccaactcctaatctcaggtgatctacccaccttggcctcccaaattgctgggattacaggcgtgaaccactgctcccttccctgtccttacccctagtgatggagttgcccactccctctatgcgcgctcgctcgctcggtggggccggcagagcagagctctgccgtctgcggacctttggtccgcaggccccaccgagcgagcgagcgcgcatagagggagtgggcaaggcctgattggccgtaaacatatcgagagagccaggtgatgccggcggcggtagtggcggcgcgggcgtattcgcgaacgcggttccagatgttacgcaacggggagaagcgttccatggcgggcacgctttgaccagtcagacgggcgcaatcttgtacgctctagatgaaaaaacagagagcggtcacggactttcctccgtagcctggaggacagaccgccagggtgcagtggcaaacaacccccggttcgagaccggctggatctgccactcccgacgcgccggccgtgcgtccacgacggaaaccccgccgagacctagccgcggtccctggatctccagatacggaggggagtctttttgttgttttttgtagatgcatccggtgttgcgacagatgcgtccgacggcgcctccaacacagccgccgctcccgccccccactagcgcccctgcagccgttgctctctccggagcaccatggaccttcttaccggcgttccaaacagcatgcttcaaagcccccaggttgtacccaccctgcgtcacaaccaggagcggttgtaccgtttcctggcgcaacgttctccctactttcagcgtcattgcgagcgtatcaaaaaagccaccgcgtttgaccaaatgaaaaacaacatgtaacggttcaataaaagcttttattgattcaaaaaattcatgcatgcagactttttattttaaaatggttctttctccccatcgccgtggctggcgggcaaagctacgttgcgatactgcaaacgagaggaccacttaaattctggaatcagcatcttaggaagggggccatcgacgttctctccccacagccgtcgtacaagttgcaaagctcccaaaaggtcaggtgcagaaattttgaaatcacagttgggaccttggccaccacgggagttgcggtatacggggttagcgcactggtaaaccagcacacagggatactggatactggcaagagccaccttgtcggttacttcttcagctctaagactgtcaacattgcttagagcgaaaggggtggctttacacatttgccgacccaattggggcacaccggtgggcttgtacaggcagtcgcagcgcatcaccattaataggcgttttagcccgttttgcatttttggatattcggcttgcataaaagcttctatctgcaaaaaagccgtctgagcctttgttccttccgagaaaaacagaccgcaggacttggcagaaaacacattggtggcacagctcacgtcttctacacaacaacgggcatcgtcattcttcagttgaaccacgctgcgcccccaccggttttgtaccaccttggctcgactcgggtgctcctttaacgcccgctgagcgttctcgctcgctacatccatttccaccaactgctctttttgaatcatttccaggccatgataacagcgtagcactccctcttgctcggtgcagccgtgaagccaaatcgcgcaaccagtgggctcccattcattgttttttaccccggcgtacgactccacgtaggctctcaaaaaacgtcccatcatttccacaaatgtcttgtggctggtgaaggtgagagggaggccgcgatgctcctcgttaagccacgtttggcaaattttgcgataaacgttgctttgttcgggtaggaacttgaagccattcttctcttcggcctccacatgatacttttccattagctttatcattaaatccatgcctttctcccaggcggaaaccaagggctctgcctgcggattaagaaccactgatgtaacagctttggaagtgctaggctcttcttcctcgttgttttcctctgacgggggaggcacacctttgggctccaagcgtcttacatatcgcttgccactggccttttgaacgacctgcacgccggggtgactgaacccggtgtacaccacctcttcttcttcctcctcgctgtctggaaccacttcgggagacggaggcaaaactggaacgcgatccggcacttgaacattcttgcgcaacttctttttgggaggaagtgacggggcccgttctggactcgtctcctgcaagtagggagtgatggtggggagttcttgctgacggccggccatgctttactcctaggcgagaaaatatggaggaggatcttaagctgcagccagactccgaaaccttaaccacccccaactctgaggtcggcgccgtcgagctagtgaaacatgaggaggaaaatgagcaagtggagcaagatccgggctatgtaacgccccccgaggacggcaaggaaccagtggccgcactcagcgaacccaactatttgggaggggaggacgacgtgctcctgaagcacatagcgcgacagagcaccattgtacgagaagccctcaaggaatgcacacagactccgctgacggtggaggaattaagccgcgcgtatgaagctaacctgttttcgccgcgtgtaccgccaaaaaagcagcctaacggcacctgcgaaacaaacccgcgcctcaatttttatcccgtctttgcggtgcctgaagcactggctacttatcacatctttttcaagaaccaacgcattcccctctcttgccgcgccaaccgtacacgcggtgacggccttttgcatctcaaagctggagctcacatacctgagatcgtttctttagaagaagtacccaagatttttgaaggtcttggcaaggacgaaaaacgggcggcaaatgctctgcaaaaaaacgaaaccgagaatcagaacgtgttggtagagctggagggtgacaacgcgcgtttggccgtactcaaacgcaccattgaagtttcacactttgcttatcccgcgctaaatcttcctcccaaagtaatgcgttctgttatggatcaagtgcttattaagcgagcagagcccattgatccccaacaacccgacctaaactctgaggacggacaacccgtagtctcagacgacgagcttgctcgctggctaggtacccaggatccctcagagctgcaagagcggcgaaaaatgatgatggcagcagttttggttacagtggaattggaatgcctgcagcgcttctttgctaaccctcaaacactgcgcaaagtcgaggagtccctgcactatgccttccgtcatggctacgttcgtcaggcctgcaagatctccaacgtagagctcagcaatctgatctcttacatgggcattctacacgaaaaccggctggggcagaacgttcttcactgcaccttgcaaggggaggcccgccgagactacgtccgcgactgcatctatcttttccttattctcacctggcaaaccgctatgggagtctggcagcagtgcttggaagagcaaaacctccaggagcttaataaattgctagtacgagcccgtcgcgaactctggacgtcttttgacgagcgtacggttgcccgccagctggcaaacctcatttttcccgagcggcttatgcaaacattgcaaaatggtttgccagactttgtcagccaaagtatcttgcaaaactttcgctcctttgtactcgagcgttccggcatcttgccggctatgagttgtgctttgccctccgattttgtccccctctgctaccgcgaatgccccccaccgttgtggagtcactgctacctcctccgtctagccaactatttggcccaccactctgatcttatggaagactctagcggcgacggactgctagaatgtcactgccgttgcaacctctgcacccctcatcgctcactggtctgtaacaccgagcttcttagcgaaacccaagtaatcggtacctttgagattcaagggccagagcaacaagaaggtgcttccagcctcaaactcacgccggcgttgtggacttccgcctacctacgcaaatttattcccgaagactatcacgcccaccaaattaaattttatgaagaccaatcacgacctcccaaagtcccccttacagcctgtgttatcacccaaagccaaattctggcccaattacaagctattcagcaggcgcgtcaggaatttcttttaaaaaaaggacacggggtctatttggacccccaaaccggtgaagaacttaataccccgtcactctccgccgccgcttcgtgccgttcgcagaaacatgccacccaagggaaacaagcatcccatcgcgcaacggcaatcccagcagaaactacaaaagcagtgggacgaggaggagacgtgggacgacagccaggcagaggaagtttcagacgaggaggcggaggagcagatggagagctgggacagcctagacgaggaggacctagaggacgtggaggaagaaaccatcgccagcgacaaggcaccatctttcaaaaaacccgttcggagccaacctccgaaaactatcccgcccctgccaccgcaaccatgttcactgaaagccagccgtaggtgggacaccgtctccatcgccggatcgccaacagccccagctggtaagcagcctaagcgcgcacgacggggatactgctcctggcgagcccataaaagcaatattgtcgcatgcctccagcactgccggggcaatatctcattcgcacggcgttacttgctttttcacgacggggtggcggttcctcgcaacgtcctctactattaccgtcatctctacagcccctacgaaacgtttggagaaaacacctcgagtgcgtaagacctcatccgccattgccacccgccaggattcgcccgccacgcaggagctcagaaaacgcatctttccgacgctgtatgctattttccagcagagccgcggtcaacagctggaactcaaagtaaaaaaccgatcactccgttcgctcacccgcagctgcttgtatcacagaagtgaagaccaactgcagcgcacgctggaggacgccgaggcactgttcaataaatattgctcggtgtctcttaaggactaaacacccgcgctttttttaggcgccaaattacgtcattgacattatgagcaaagacattcccacgccttacatgtggagctatcagccgcaaatgggcctggcagctggagcttctcaggattactccagtcgcatgaattggcttagtgccggcccccacatgattgggcgggtaaatggaattcgtgccactcgaaaccaaattctgctagaacaggccgccctaacctctaccccgcgacgtcagctgaacccaccctcttggcctgccgcccaggtttatcaggaaaaccccgccccgaccacagtccttctgccacgcgacgcggaagccgaagtccaaatgactaactccggagcgcaattagcgggcggcgccagacacgtcaggttcagagatcgaccctcgccctattcctccgaggtgaccctaacatggccatatcttttcagagcatttataatcatgcaatagaaggctactcattaaaattcacctggcgcgttcgaaataatgaacgttttgacatcccctgttgctcattttcttatgtaacagaacaataaaatattgttattttgtattttcaactttattgatacttttacagaattctaaccgttaatctccctccccccttccactttaccttatacacctccctttccccctgtaccaccgcaaacaactgcaatttaggatttacacaacgattcttctgtgacaaaatcaacacaggttctttgctggcaaagcgctgatccgtaatggaaatgaaaccttcagaaacatcgtccaacagcacggtggagtccaaagcagagctctgcaaaaacaaatacagtcaagctctccacgggttctcgcctctgttgtagtctgccaacgtaaacgggcagtaccgctccatcaagccccgcagtaatccctgtctccggggttccaccaagctcctcatgagtgacctaacggtgaagcttcccaacactttcaccgccttggccagcagccgccgcgtccgacgagcgcagcaccgcacagaaagctcatccaagtttttacaataggtacagcccaacaccaccatattattcataattccataactaaaaaaactccacccaaacgacatgcgctccaacactatagccgcgtgcccatcatacagcaggcgaatatatataaaatgcctacctctgacaaacacgctccccataaataacacttccttgggcatgccacaatttacaatttctcgataccaagggaatcttaagttatacagtgaaccataaatcatcattttaaaccaatttgctaacactacaccccccgccttacattgaagagacccaggtttaatacagtgacagtgtatagtccagcgttcaaaacctcttacaatttgattaaaatcaacattaatagtggcacagcaaacacaaacacgcatgtaaattttgcacacatgcttttcccatttagacaatatcatgtcccaccacattggccactcctgcaatactacaaaaggcgcacaagatggaatagacctcacctcgctcacataatgcatattcaaatgttcacactctaaaagtccaggagtcctttccattgtggcaataggcacagaatcctcagagggaggtggaagacggtgggtttggtacgaactcagtctgcagcgaaaccatctgtcgcgttgcatcataaattaaaagctcgcgcacagcttcgtacttctgttttaagaaacgaacacgctgccaacaaatgttcgcaaatcgacggtttcgttgtcgcgctctttcagttttcagggcaacgttcagccactcctgcagtccacttaacagctcctcagcccgtggagatatgctgacattataccttattatgtccccataaacgttcaaacagcaggttaaagccaactccaaccaagaaatacaaaggccttgatcccgactcactggaggtggagggagagacggaagaggcataattattccagacggttgtaaagcgagccaaagtgcaagtcacgaagatcacacctctccccaccgctgcgttggtgaaaaattacagccaagtcaaaaaagatgcgattttccaaattaccaatcacggcttccactaaggctggcacacgcacttcaagaaacacaaacatagcaaaagcattttcctcaaaatcttcaaacattaagctgcaatcttgaataattcccaaataattttccgcttgccacccgcgcaacacatccattaaaatttcttgtaaactggcgccatgtaattcaaaaagtttgttaagagcaccctctactgtcatacgcaggcacaccttcatggttgaaaaagatcaggttcccgtgtcacctgcagttcatttaaaagattaacattaggctcaaaaccccgatcccgaatctccatgcgtagcattagttgtacaaagtcatccaaatcattgcatataagctctgtcagttcgctatcaggaagcagctcaggtgatgctacacaacaaatcatctctagcgtaggagctaaagacgttaaggtaaagccacaataagcagcttgaagaactggagtaacacaatgcaaaatgtgcagcaaaaactccgacatgtttgtctttaaaaaatctaccacagaaatgtccatattatttaaataaaacatcaggggctcaggaaccaccaccgaaataaaaaccggtcgtaacaaatacattgtgtcctgcaacaaaaaaaaaatattaatgcccacacctgggaaaacctgttctaaaaccaaacaggtataagtattacaaatgcctccctttgccccccaatccaaaccaaataagctgccccgtcttaccgcgacaaagcacacagaacaaaacacactccgcagacgaacacaatatttatacactccctttgccgtcaaaagtccacaaaaactccaaaggtcagaaaaaccgccacatgaacacttccgcatactgtttcacatatggcctatgtggcccagagagggagtggccaactccatcactaggggtagcgcgaagcgcctcccacgctgccgcgtcagcgctgacgtaaattacgtcataggggagtggtcctgtattagctgtcacgtgagtgcttttgcggcattttgcgacaccacgtggccatttgaggtatatatggccgagtgagcgagcaggatctccattttgaccgcgaaatttgaacgagcagcagccatgccgggcttctacgagatcgtgatcaaggtgccgagcgacctggacgagcacctgccgggcatttctgactcgtttgtgaactgggtggccgagaaggaatgggagctgcccccggattctgacatggatcggaatctgatcgagcaggcacccctgaccgtggccgagaagctgcagcgcgacttcctggtccactggcgccgcgtgagtaaggctccggaggccctcttctttgttcagttcgagaagggcgagtcctactttcacctgcacgttctggtcgagaccacgggggtcaagtccatggtcctgggccgcttcctgagtcagatcagagacaggctggtgcagaccatctaccgcggggtagagcccacgctgcccaactggttcgcggtgaccaagacgcgaaatggcgccggcggggggaacaaggtggtggacgagtgctacatccccaactacctcctgcccaagacgcagcccgagctgcagtgggcgtggactaacatggaggagtatataagcgcgtgtctgaacctcgcggagcgtaaacggctcgtggcgcagcacctgacccacgtcagccagacgcaggagcagaacaaggagaatctgaacccgaattctgacgcgcccgtgatcaggtcaaaaacctccgcgcgctacatggagctggtcgggtggctggtggaccggggcatcacctccgagaagcagtggatccaggaggaccaggcctcgtacatctccttcaacgccgcctccaactcgcggtcccagatcaaggccgcgctggacaatgccggaaagatcatggcgctgaccaaatccgcgcccgactacctggtaggcccgtccttacccgcggacattaaggccaaccgcatctaccgcatcctggagctcaacggctacgaccccgcctacgccggctccgtcttcctgggctgggcgcagaaaaagttcggtaaaaggaatacaatttggctgttcgggcccgccaccaccggcaagaccaacatcgcggaagccatcgcccacgccgtgcccttctacggctgcgtcaactggaccaatgagaactttcccttcaacgattgcgtcgacaagatggtgatctggtgggaggagggcaagatgaccgccaaggtcgtggagtccgccaaggccattctgggcggaagcaaggtgcgcgtcgaccaaaagtgcaagtcctcggcccagatcgaccccacgcccgtgatcgtcacctccaacaccaacatgtgcgccgtgatcgacgggaacagcaccaccttcgagcaccagcagcccctgcaggaccgcatgttcaagttcgagctcacccgccgtctggagcacgactttggcaaggtgaccaagcaggaagtcaaagagttcttccgctgggctcaggatcacgtgactgaggtgacgcatgagttctacgtcagaaagggcggagccaccaaaagacccgcccccagtgacgcggatataagcgagcccaagcgggcctgcccctcagttgcggagccatcgacgtcagacgcggaagcaccggtggactttgcggacaggtaccaaaacaaatgttctcgtcacgcgggcatgcttcagatgctgtttccctgcaagacatgcgagagaatgaatcagaatttcaacgtctgcttcacgcacggggtcagagactgctcagagtgcttccccggcgcgtcagaatctcaacctgtcgtcagaaaaaagacgtatcagaaactgtgcgcgattcatcatctgctggggcgggcacccgagattgcgtgttcggcctgcgatctcgtcaacgtggacttggatgactgtgtttctgagcaataaatgacttaaaccaggtggcctctatggccatggctgccgatggttatcttccagattggctcgaggacactctctctgaaggaataagacagtggtggaagctcaaacctggcccaccaccaccaaagcccgcagagcggcataaggacgacagcaggggtcttgtgcttcctgggtacaagtacctcggacccttcaacggactcgacaagggagagccggtcaacgaggcagacgccgcggccctcgagcacgacaaagcctacgaccggcagctcgacagcggagacaacccgtacctcaagtacaaccacgccgacgcggagtttcaggagcgccttaaagaagatacgtcttttgggggcaacctcggacgagcagtcttccaggcgaaaaagagggttcttgaacctctgggcctggttgaggaacctgttaagacggctccgggaaaaaagaggccggtagagcactctcctgtggagccagactcctcctcgggaaccggaaaggcgggccagcagcctgcaagaaaaagattgaattttggtcagactggagacgcagactcagtacctgacccccagcctctcggacagccaccagcagccccctctggtctgggaactaatacgatggctacaggcagtggcgcaccaatggcagacaataacgagggcgccgacggagtgggtaattcctcgggaaattggcattgcgattccacatggatgggcgacagagtcatcaccaccagcacccgaacctgggccctgcccacctacaacaaccacctctacaaacaaatttccagccaatcaggagcctcgaacgacaatcactactttggctacagcaccccttgggggtattttgacttcaacagattccactgccacttttcaccacgtgactggcaaagactcatcaacaacaactggggattccgacccaagagactcaacttcaagctctttaacattcaagtcaaagaggtcacgcagaatgacggtacgacgacgattgccaataaccttaccagcacggttcaggtgtttactgactcggagtaccagctcccgtacgtcctcggctcggcgcatcaaggatgcctcccgccgttcccagcagacgtcttcatggtgccacagtatggatacctcaccctgaacaacgggagtcaggcagtaggacgctcttcattttactgcctggagtactttccttctcagatgctgcgtaccggaaacaactttaccttcagctacacttttgaggacgttcctttccacagcagctacgctcacagccagagtctggaccgtctcatgaatcctctcatcgaccagtacctgtattacttgagcagaacaaacactccaagtggaaccaccacgcagtcaaggcttcagttttctcaggccggagcgagtgacattcgggaccagtctaggaactggcttcctggaccctgttaccgccagcagcgagtatcaaagacatctgcggataacaacaacagtgaatactcgtggactggagctaccaagtaccacctcaatggcagagactctctggtgaatccgggcccggccatggcaagccacaaggacgatgaagaaaagttttttcctcagagcggggttctcatctttgggaagcaaggctcagagaaaacaaatgtggacattgaaaaggtcatgattacagacgaagaggaaatcaggacaaccaatcccgtggctacggagcagtatggttctgtatctaccaacctccagagaggcaacagacaagcagctaccgcagatgtcaacacacaaggcgttcttccaggcatggtctggcaggacagagatgtgtaccttcaggggcccatctgggcaaagattccacacacggacggacattttcacccctctcccctcatgggtggattcggacttaaacaccctcctccacagattctcatcaagaacaccccggtacctgcgaatccttcgaccaccttcagtgcggcaaagtttgcttccttcatcacacagtactccacgggacaggtcagcgtggagatcgagtgggagctgcagaaggaaaacagcaaacgctggaatcccgaaattcagtacacttccaactacaacaagtctgttaatgtggactttactgtggacactaatggcgtgtattcagagcctcgccccattggcaccagatacctgactcgtaatctgttgcttgttaatcaataaaccgtttaattcgtttcagttgaactttggtctctgcgtatttctttcttatctagtttccatggctacgtagataagtagcatggcgggttaatcattaactacagcccgggcgtttaaacagcgggcggaggggtggagtcgtgacgtgaattacgtcatagggttagggaggtcctgtattagaggtcacgtgagtgttttgcgacattttgcgacaccatgtggtctcgctgggggggggggcccgagtgagcacgcagggtctccattttgaagcgggaggtttgaacgcggccgcaaaaggccttcttggccaccccgggccgtcgaccaattctcatgtttgacagcttatcatcgaatttctgccattcatccgcttattatcacttattcaggcgtagcaaccaggcgtttaagggcaccaataactgccttaaaaaaattacgccccgccctgccactcatcgcagtactgttgtaattcattaagcattctgccgacatggaagccatcacaaacggcatgatgaacctgaatcgccagcggcatcagcaccttgtcgccttgcgtataatatttgcccatggtgaaaacgggggcgaagaagttgtccatattggccacgtttaaatcaaaactggtgaaactcacccagggattggctgagacgaaaaacatattctcaataaaccctttagggaaataggccaggttttcaccgtaacacgccacatcttgcgaatatatgtgtagaaactgccggaaatcgtcgtggtattcactccagagcgatgaaaacgtttcagtttgctcatggaaaacggtgtaacaagggtgaacactatcccatatcaccagctcaccgtctttcattgccatacggaattccggatgagcattcatcaggcgggcaagaatgtgaataaaggccggataaaacttgtgcttatttttctttacggtctttaaaaaggccgtaatatccagctgaacggtctggttataggtacattgagcaactgactgaaatgcctcaaaatgttctttacgatgccattgggatatatcaacggtggtatatccagtgatttttttctccattttagcttccttagctcctgaaaatctcgataactcaaaaaatacgcccggtagtgatcttatttcattatggtgaaagttggaacctcttacgtgccgatcaacgtctcattttcgccaaaagttggcccagggcttcccggtatcaacagggacaccaggatttatttattctgcgaagtgatcttccgtcacaggtatttattcgcgataagctcatggagcggcgtaaccgtcgcacaggaaggacagagaaagcgcggatctgggaagtgacggacagaacggtcaggacctggattggggaggcggttgccgccgctgctgctgacggtgtgacgttctctgttccggtcacaccacatacgttccgccattcctatgcgatgcacatgctgtatgccggtataccgctgaaagttctgcaaagcctgatgggacataagtccatcagttcaacggaagtctacacgaaggtttttgcgctggatgtggctgcccggcaccgggtgcagtttgcgatgccggagtctgatgcggttgcgatgctgaaacaattatcctgagaataaatgccttggcctttatatggaaatgtggaactgagtggatatgctgtttttgtctgttaaacagagaagctggctgttatccactgagaagcgaacgaaacagtcgggaaaatctcccattatcgtagagatccgcattattaatctcaggagcctgtgtagcgtttataggaagtagtgttctgtcatgatgcctgcaagcggtaacgaaaacgatttgaatatgccttcaggaacaatagaaatcttcgtgcggtgttacgttgaagtggagcggattatgtcagcaatggacagaacaacctaatgaacacagaaccatgatgtggtctgtccttttacagccagtagtgctcgccgcagtcgagcgacagggcgaagccctcgagtgagcgaggaagcaccagggaacagcacttatatattctgcttacacacgatgcctgaaaaaacttcccttggggttatccacttatccacggggatatttttataattattttttttatagtttttagatcttcttttttagagcgccttgtaggcctttatccatgctggttctagagaaggtgttgtgacaaattgccctttcagtgtgacaaatcaccctcaaatgacagtcctgtctgtgacaaattgcccttaaccctgtgacaaattgccctcagaagaagctgttttttcacaaagttatccctgcttattgactcttttttatttagtgtgacaatctaaaaacttgtcacacttcacatggatctgtcatggcggaaacagcggttatcaatcacaagaaacgtaaaaatagcccgcgaatcgtccagtcaaacgacctcactgaggcggcatatagtctctcccgggatcaaaaacgtatgctgtatctgttcgttgaccagatcagaaaatctgatggcaccctacaggaacatgacggtatctgcgagatccatgttgctaaatatgctgaaatattcggattgacctctgcggaagccagtaaggatatacggcaggcattgaagagtttcgcggggaaggaagtggttttttatcgccctgaagaggatgccggcgatgaaaaaggctatgaatcttttccttggtttatcaaacgtgcgcacagtccatccagagggctttacagtgtacatatcaacccatatctcattcccttctttatcgggttacagaaccggtttacgcagtttcggcttagtgaaacaaaagaaatcaccaatccgtatgccatgcgtttatacgaatccctgtgtcagtatcgtaagccggatggctcaggcatcgtctctctgaaaatcgactggatcatagagcgttaccagctgcctcaaagttaccagcgtatgcctgacttccgccgccgcttcctgcaggtctgtgttaatgagatcaacagcagaactccaatgcgcctctcatacattgagaaaaagaaaggccgccagacgactcatatcgtattttccttccgcgatatcacttccatgacgacaggatagtctgagggttatctgtcacagatttgagggtggttcgtcacatttgttctgacctactgagggtaatttgtcacagttttgctgtttccttcagcctgcatggattttctcatactttttgaactgtaatttttaaggaagccaaatttgagggcagtttgtcacagttgatttccttctctttcccttcgtcatgtgacctgatacgcgtgctaccttaagagagtcaattcgcccttcccggtcgatatgaacagcttatttacataattcacgttattggtagttataaatgaaattcctaatatcggttatgaagtgaaattgaatttctacttgatctttctctctatttttgtaaaataaaattaagaatatttaaatattcaatgattcatttttgcagaaatcggaggaagaagaatatatgaaaacatttaacatttctcaacaagatccccccatattgttgtataagtgatgaaatactgaatttaaaacttagtttatatgtggtaaaatgttttaatcaagtttaggaggaattaattatgaagtgtaatgaataatgaatgtaacagggttcaattaaaagagggaagcgtatcattaaccctataaactacgtctgccctcattattggagggtgaaatgtgaatacatcctattcacaatcgaatttacgacacaaccaaattttaatttggctttgcattttatctttttttagcgtattaaatgaaatggttttgaacgtctcattacctgatattgcaaatgattttaataaaccaccagcgagtacaaactgggtgaacacagcctttatgttaaccttttccattggaacagctgtatatggaaagctatctgatcaattaggcatcaaaaggttactcctatttggaattataataaattgtttcgggtcggtaattgggtttgttggccattctttcttttccttacttattatggctcgttttattcaaggggctggtgcagctgcatttccagcactcgtaatggttgtagttgcgcgctatattccaaaggaaaataggggtaaagcatttggtcttattggatcgatagtagccatgggagaaggagtcggtccagcgattggtggaatgatagcccattatattcattggtcctatcttctactcattcctatgataacaattatcactgttccgtttcttatgaaattattaaagaaagaagtaaggataaaaggtcattttgatatcaaaggaattatactaatgtctgtaggcattgtattttttatgttgtttacaacatcatatagcatttcttttcttatcgttagcgtgctgtcattcctgatatttgtaaaacatatcaggaaagtaacagatccttttgttgatcccggattagggaaaaatataccttttatgattggagttctttgtgggggaattatatttggaacagtagcagggtttgtctctatggttccttatatgatgaaagatgttcaccagctaagtactgccgaaatcggaagtgtaattattttccctggaacaatgagtgtcattattttcggctacattggtgggatacttgttgatagaagaggtcctttatacgtgttaaacatcggagttacatttctttctgttagctttttaactgcttcctttcttttagaaacaacatcatggttcatgacaattataatcgtatttgttttaggtgggctttcgttcaccaaaacagttatatcaacaattgtttcaagtagcttgaaacagcaggaagctggtgctggaatgagtttgcttaactttaccagctttttatcagagggaacaggtattgcaattgtaggtggtttattatccatacccttacttgatcaaaggttgttacctatggaagttgatcagtcaacttatctgtatagtaatttgttattacttttttcaggaatcattgtcattagttggctggttaccttgaatgtatataaacattctcaaagggatttctaaatcgttaagggatcaactttgggagagagttcaaaattgatcctttttttataacaggaattgggcatcaaataaaacgaaaggctcagtcgaaagactgggcctttcgttttatctgttgtttgtcggtgaacgctctcctgagtaggacaaatccgccgggagcggatttgaacgttgcgaagcaacggcccggagggtggcgggcaggacgcccgccataaactgccaggcatcaaattaagcagaaggccatcctgacggatggcctttttgcgtttctacaaactcttcctgtcgtcatatctacaattctacacagcccagtccagactattcggcactgaaattatgggtgaagtggtcaagacctcactaggcaccttaaaaatagcgcaccctgaagaagatttatttgaggtagcccttgcctacctagcttccaagaaagatatcctaacagcacaagagcggaaagatgttttgttctacatccagaacaacctctgctaaaattcctgaaaaattttgcaaaaagttgttgactttatctacaaggtgtggcataatgtgtggaattgtgagcggataacaattaagctaattctatggtaaaagcattcctgaacccaatatccttatttttagtggacaaggccttgttctcatatggttgcttgagccagtgccttacaaggctcttccgctttggcaggctgttcaaaattatttattagagcaactcaaggaactaggcggagatccaaaagcaaccgatgcagcacgtgtttttcggattgctgggagcgtcaatagtaagaatggagcggaagtaagagcggaatatcggcacgattacagatatgagttaaggcagattcaatttgattaccttccagaactcaatgaggttattaatcccgctccacaaaagaaaaaacgggggcgtaaaaagaaagtagttcagttattcaatacctacaaactccattacgctcgcctattggatatagtgaaattggtggaactacgaaattatgaggtaactggatacagggaaatcatttgctttttataccgttattggttgtgctgttacacgaacgaccctgtagaggctttaaatcaaacacagacacttaatttacagttcactgagcctttacccttaaaagaggttgaaagggctacacggagcgcagaaaaggcgtgggaagcacgaaataacgaagaggctaaccggattgcaatcgaaaaaggatatcccagtgctggatacaatattagcaataaaaagttgattgaatggctagatatcacaccagaagaacagaagcatttacagacgattatagacgctaatgagaaacggagaagaaagcgggaaagggataggatttatcaagaacaaaaacgtcgtgagcggggagatatgacccgacaggagtatattaagcaacaacaggataaaacagatgataaattatttaaattgcaggagttattagaacagaatcccaaaatctcaaaaattaaattagcaaaaatacttggtgtagataaatcgcacttatacagactgctgaaacaactataactggaaaaaattagtgtctcatggttcgtcgcccttatattatgggcgttagcctgcttgctaattggataggtgttattgtcatttcaacgtcggacgttttggtagatgaacgtcggacgttatttgcttcaatagattgttgatgtattaagggttgcagtgaatcgacaagcaaaaagttatgacgttgtgaaaaaattgaatagaaaattggaaattacgtcggacgttctaacttaaaaaccctgttatatcaatgatttaaaaggaaattaacgtcataaaagacctttctgcaacaaaagtttttctggaagagttgaggttattttataggtattatggacttttgtagactttttgtgtactttttgtggactccacactcgctggtatcgtgttattttttaattgagatatgaatatggaaattaaacgttttaggcgttggtttggtgatgacaaaaaaataagagtacccgctcacaacggatactctttcgagaaatgtacgaaacgctataaataaaaaataactagatacatttacattgtatcacgtttcgtacatttctccaataacaaattgattggaggaatgcaaagtgaataatgaaccagtaaaacgtggtaagaagaacagatgggaattaaacctacctataatgacttatgtagtagctgatgattggattgataaactaggacacgaaacgtttactttatggttgaggttccatacttgggtagatagagaagatgaactccgagattatgatcgcatacctagaagttttgagaacatatataaaaagacactaggaatctcaaaaagtaagttttatagattgataaaacctttatgggaatatggattaatagacatcatagaatacgaagaatctaaccgtaattctactaaacctaaaaatataattgtttatgagtatcctttacacgaaatagaaagaaagtataaaccactagaaaaattaagagattgggataaagactataattccgtttctaaagaattaggtaaaacaggtggtagaccaaggaaaaaagatagtgaagaagaacccgaaaagaaacccgaagaagtaactaaaaagaaacgtaaatataagttaaaaagagttatccacaacggtttcaaaaatgaaacggtggagggtttcaaaaatgaaacggtggagggtttcaaaaatgaaacggtgaccgtttcaaaaataaaacccaataattattcaaatatctttaataacttatcaaatatttctactaatgtttcaaataatttattaattgatgatgatgaggaaatcgaaaatgaaccaactggtcgtacaataaataggtcattacttttttcacaagaagatattaaacaggcctatcaatttattaatagattttcagttatacagttacgtgaaaactttagctttgataaacactttgaagaacggttggtatgttatttatggaaagcagggatttctactttttacacgcacgaaatcagtaaaatgataaaaaaaatagcagactatgaaaaatctaaaaaaggtagattaaacccaatacgtgaccgagccttatatatggtaaatggtcttgtaatgaatagagcttcttcccaaagtgaacatgctacttataaactaaaccaatataaaaaacagaaggaacaggaaaaacaacaacaggagcaacaaagatcaagagtaccgttctataattggttggaggaaagagaagaacaaaccgaaggtcaactacccaccacttaaagcctaacggcttttgaagtggggcttgtaaaaagccctagttgactaccccaagtctttcgaggactacgttggaaaggtcatgacacctacaaatgctcctctagttcgtagccactgtcgttgatggttaaaagtcctgatgggtagggacggtgctgtcaacatcacaagcccttccaacatgggggaagaggaagaacactccgagaaaggagggggctgtcgtacacgccttgttcgtgtacgtgatttttaacacttttatctctaatataatctctccttgagttagcagagactaagaataaaacacattaggattttttatctacataaggaggttcaatacatgcctactatttcgtttaagggaaagtcttttgtacaaaatcatcacttgactgtaaaatatcatgaattgatcccagaaccagaaaaaagtctgaccgataaagttagtcttcatgacaatcttatcattcatggggacaatttaaaggcgttgaaagctctactacctacatatgctggtaagatagattgcatctatattgacccaccatacaatactggaactgaaaaatggatttataatgataatgtcaactccccaatgattagggaatggcttggaaaagtggtagacaaagaagacttatcccgacatgataagtggctttgtatgatgatgccgaggttaaaactgttgaaagagttgttgtcagaagacggagtgatatttgtaagcattgactacaatgaaatacaccatcttacgtgccttatgaacgaaatattcggtgaggagaattttcgtgacgctattatcattcgtagaggagtaaaaaatgttcaagcgcaatttgacacaattgattctctttcaaatggttatgagtctattttggtttacactaaacagccatctcgacgatttaataaggtttatgaagatgtagaagaaaagcctggtagttggaataatcattggagaggtacagaccgtaaaactatgagatatgaattatttggggttactccgacagaaggtcaatggagatgggggaaagaacgtagtctccaggctattgaaaactatcaaatgatgttagatgaacttagacaaaaaggcattactaatccaactcaagaggatattgataaatggtatcttgaatatgtagaaaataatggggaagatattgacttgttacgacaaaatgataatggcacgattgagcactttgttccaccgactagcaaaaagttgttaagtaatgcctggtttgacttaaaacccaacggttctagtcaattaaagaagatatttggaaggaaggttttcgataaccctaaatcaattgatttggtaaaaagactaatacaatttgcgactgaaaacaaagaagcgattgtacttgactcatttgcagggagtggcactactgctcatgcagtattatcgcttaacaaacaagatggagggaatcgtcgtttcatccttattgagatggaagaatatgcacatgagattaccgcagaacgcggatctttatcgatttgcatgcaagctaattcggtggaaacgaggtcatcatttccttccgaaaaaacggttgcatttaaatcttacatatgtaatactttcaaagactacatttgtaagatttgatgtttgagtcggctgaaagatcgtacgtaccaattattgtttcgtgattgttcaagccataacactgtagggatagtggaaagagtgcttcatctggttacgatcaatcaaatattcaaacggagggagacgattttgatgaaaccagtaacgttatacgatgtcgcagagtatgccggtgtctcttatcagaccgtttcccgcgtggtgaaccaggccagccacgtttctgcgaaaacgcgggaaaaagtggaagcggcgatggcggagctgaattacattcccaaccgcgtggcacaacaactggcgggcaaacagtcgttgctgattggcgttgccacctccagtctggccctgcacgcgccgtcgcaaattgtcgcggcgattaaatctcgcgccgatcaactgggtgccagcgtggtggtgtcgatggtagaacgaagcggcgtcgaagcctgtaaaacggcggtgcacaatcttctcgcgcaacgcgtcagtgggctgatcattaactatccgctggatgaccaggatgccattgctgtggaagctgcctgcactaatgttccggcgttatttcttgatgtctctgaccagacacccatcaacagtattattttctcccatgaagacggtacgcgactgggcgtggagcatctggtcgcattgggtcaccagcaaatcgcgctgttagcgggcccattaagttctgtctcggcgcgtctgcgtctggctggctggcataaatatctcactcgcaatcaaattcagccgatagcggaacgggaaggcgactggagtgccatgtccggttttcaacaaaccatgcaaatgctgaatgagggcatcgttcccactgcgatgctggttgccaacgatcagatggcgctgggcgcaatgcgcgccattaccgagtccgggctgcgcgttggtgcggatatctcggtagtgggatacgacgataccgaagacagctcatgttatatcccgccgttaaccaccatcaaacaggattttcgcctgctggggcaaaccagcgtggaccgcttgctgcaactctctcagggccaggcggtgaagggcaatcagctgttgcccgtctcactggtgaaaagaaaaaccaccctggcgcccaatacgcaaaccgcctctccccgcgcgttggccgattcattaatgcagctggcacgacaggtttcccgactggaaagcgggcagtgagcgcaacgcaattaatgtgagttaggatcgctaccttaagagagacgcgttatcgggggttagttcgtcatcattgatgagggttgattatcacagtttattactctgaattggctatccgcgtgtgtacctctacctggagtttttcccacggtggatatttcttcttgcgctgagcgtaagagctatctgacagaacagttcttctttgcttcctcgccagttcgctcgctatgctcggttacacggctgcggcgagcgctagtgataataagtgactgaggtatgtgctcttcttatctccttttgtagtgttgctcttattttaaacaactttgcggttttttgatgactttgcgattttgttgttgctttgcagtaaattgcaagatttaataaaaaaacgcaaagcaatgattaaaggatgttcagaatgaaactcatggaaacacttaaccagtgcataaacgctggtcatgaaatgacgaaggctatcgccattgcacagtttaatgatgacagcccggaagcgaggaaaataacccggcgctggagaataggtgaagcagcggatttagttggggtttcttctcaggctatcagagatgccgagaaagcagggcgactaccgcacccggatatggaaattcgaggacgggttgagcaacgtgttggttatacaattgaacaaattaatcatatgcgtgatgtgtttggtacgcgattgcgacgtgctgaagacgtatttccaccggtgatcggggttgctgcccataaaggtggcgtttacaaaacctcagtttctgttcatcttgctcaggatctggctctgaaggggctacgtgttttgctcgtggaaggtaacgacccccagggaacagcctcaatgtatcacggatgggtaccagatcttcatattcatgcagaagacactctcctgcctttctatcttggggaaaaggacgatgtcacttatgcaataaagcccacttgctggccggggcttgacattattccttcctgtctggctctgcaccgtattgaaactgagttaatgggcaaatttgatgaaggtaaactgcccaccgatccacacctgatgctccgactggccattgaaactgttgctcatgactatgatgtcatagttattgacagcgcgcctaacctgggtatcggcacgattaatgtcgtatgtgctgctgatgtgctgattgttcccacgcctgctgagttgtttgactacacctccgcactgcagtttttcgatatgcttcgtgatctgctcaagaacgttgatcttaaagggttcgagcctgatgtacgtattttgcttaccaaatacagcaatagtaatggctctcagtccccgtggatggaggagcaaattcgggatgcctggggaagcatggttctaaaaaatgttgtacgtgaaacggatgaagttggtaaaggtcagatccggatgagaactgtttttgaacaggccattgatcaacgctcttcaactggtgcctggagaaatgctctttctatttgggaacctgtctgcaatgaaattttcgatcgtctgattaaaccacgctgggagattagataatgaagcgtgcgcctgttattccaaaacatacgctcaatactcaaccggttgaagatacttcgttatcgacaccagctgccccgatggtggattcgttaattgcgcgcgtaggagtaatggctcgcggtaatgccattactttgcctgtatgtggtcgggatgtgaagtttactcttgaagtgctccggggtgatagtgttgagaagacctctcgggtatggtcaggtaatgaacgtgaccaggagctgcttactgaggacgcactggatgatctcatcccttcttttctactgactggtcaacagacaccggcgttcggtcgaagagtatctggtgtcatagaaattgccgatgggagtcgccgtcgtaaagctgctgcacttaccgaaagtgattatcgtgttctggttggcgagctggatgatgagcagatggctgcattatccagattgggtaacgattatcgcccaacaagtgcttatgaacgtggtcagcgttatgcaagccgattgcagaatgaatttgctggaaatatttctgcgctggctgatgcggaaaatatttcacgtaagattattacccgctgtatcaacaccgccaaattgcctaaatcagttgttgctcttttttctcaccccggtgaactatctgcccggtcaggtgatgcacttcaaaaagcctttacagataaagaggaattacttaagcagcaggcatctaaccttcatgagcagaaaaaagctggggtgatatttgaagctgaagaagttatcactcttttaacttctgtgcttaaaacgtcatctgcatcaagaactagtttaagctcacgacatcagtttgctcctggagcgacagtattgtataagggcgataaaatggtgcttaacctggacaggtctcgtgttccaactgagtgtatagagaaaattgaggccattcttaaggaacttgaaaagccagcaccctgatgcgaccacgttttagtctacgtttatctgtctttacttaatgtcctttgttacaggccagaaagcataactggcctgaatattctctctgggcccactgttccacttgtatcgtcggtctgataatcagactgggaccacggtcccactcgtatcgtcggtctgattattagtctgggaccacggtcccactcgtatcgtcggtctgattattagtctgggaccacggtcccactcgtatcgtcggtctgataatcagactgggaccacggtcccactcgtatcgtcggtctgattattagtctgggaccatggtcccactcgtatcgtcggtctgattattagtctgggaccacggtcccactcgtatcgtcggtctgattattagtctggaaccacggtcccactcgtatcgtcggtctgattattagtctgggaccacggtcccactcgtatcgtcggtctgattattagtctgggaccacgatcccactcgtgttgtcggtctgattatcggtctgggaccacggtcccacttgtattgtcgatcagactatcagcgtgagactacgattccatcaatgcctgtcaagggcaagtattgacatgtcgtcgtaacctgtagaacggagtaacctcggtgtgcggttgtatgcctgctgtggattgctgctgtgtcctgcttatccacaacattttgcgcacggttatgtggacaaaatacctggttacccaggccgtgccggcacgttaaccgggctgcatccgatgcaagtgtgtcgctgtcgacgagctcgcgagctcggacatgaggttgccccgtattcagtgtcgctgatttgtattgtctgaagttgtttttacgttaagttgatgcagatcaattaatacgatacctgcgtcataattgattatttgacgtggtttgatggcctccacgcacgttgtgatatgtagatgataatcattatcactttacgggtcctttccggtgatccgacaggttacggggcggcgacctcgcgggttttcgctatttatgaaaattttccggtttaaggcgtttccgttcttcttcgtcataacttaatgtttttatttaaaataccctctgaaaagaaaggaaacgacaggtgctgaaagcgagctttttggcctctgtcgtttcctttctctgtttttgtccgtggaatgaacaatggaagtccgagctcatcgctaataacttcgtatagcatacattatacgaagttatattcgat

SEQ ID NO: 167 - DNA, 30157 bp, synthetic construct
  misc_feature 1..30157: note = seed plasmid 8
  source 1..30157: mol_type = other DNA
gcggccgcttggccactccctctatgcgcgctcgctcgctcggtggggcctgcggaccaaaggtccgcagacggcagagctctgctctgccggccccaccgagcgagcgagcgcgcatagagggagtggccaactccatcactaggggtaccgcgggccttgatggccaattcgattcgattagggcctacttggcctaatagtaatcaattacggggtcattagttcatagcccatatatggagttccgcgttacataacttacggtaaatggcccgcctggctgaccgcccaacgacccccgcccattgacgtcaataatgacgtatgttcccatagtaacgccaatagggactttccattgacgtcaatgggtggagtatttacggtaaactgcccacttggcagtacatcaagtgtatcatatgccaagtacgccccctattgacgtcaatgacggtaaatggcccgcctggcattatgcccagtacatgaccttatgggactttcctacttggcagtacatctacgtattagtcatcgctattaccatggtgatgcggttttggcagtacatcaatgggcgtggatagcggtttgactcacggggatttccaagtctccaccccattgacgtcaatgggagtttgttttggcaccaaaatcaacgggactttccaaaatgtcgtaacaactccgccccattgacgcaaatgggcggtaggcgtgtacggtgggaggtctatataagcagagctggtttagtgaaccgtcagatgccaccatggtgagcaagggcgaggagctgttcaccggggtggtgcccatcctggtcgagctggacggcgacgtaaacggccacaagttcagcgtgtccggcgagggcgagggcgatgccacctacggcaagctgaccctgaagttcatctgcaccaccggcaagctgcccgtgccctggcccaccctcgtgaccaccctgacctacggcgtgcagtgcttcagccgctaccccgaccacatgaagcagcacgacttcttcaagtccgccatgcccgaaggctacgtccaggagcgcaccatcttcttcaaggacgacggcaactacaagacccgcgccgaggtgaagttcgagggcgacaccctggtgaaccgcatcgagctgaagggcatcgacttcaaggaggacggcaacatcctggggcacaagctggagtacaactacaacagccacaacgtctatatcatggccgacaagcagaagaacggcatcaaggtgaacttcaagatccgccacaacatcgaggacggcagcgtgcagctcgccgaccactaccagcagaacacccccatcggcgacggccccgtgctgctgcccgacaaccactacctgagcacccagtccgccctgagcaaagaccccaacgagaagcgcgatcacatggtcctgctggagttcgtgaccgccgccgggatcactctcggcatggacgagctgtacaagtaagggtggcatccctgtgacccctccccagtgcctctcctggccctggaagttgccactccagtgcccaccagccttgtcctaataaaattaagttgcatcattttgtctgactaggtgtccttctataatattatggggtggaggggggtggtatggagcaaggggcaagttgggaagacaacctgtagggcctgcggggtctattgggaaccaagctggagtgcagtggcacaatcttggctcactgcaatctccgcctcctgggttcaagcgattctcctgcctcagcctcccgagttgttgggattccaggcatgcatgaccaggctcagctaatttttgtttttttggtagagacggggtttcaccatattggccaggctggtctccaactcctaatctcaggtgatctacccaccttggcctcccaaattgctgggattacaggcgtgaaccactgctcccttccctgtccttcgcggtacccctagtgatggagttggccactccctctatgcgcgctcgctcgctcggtggggcctgcggaccaaaggtccgcagacggcagagctctgctctgccggccccaccgagcgagcgagcgcgcatagagggagtggccaaggcctgattggccgtagatgtagcgggagagccaggtgatgccggccgaggtggtcgcggccctggtgaattcgcgaacgcggttccagatgttgcgcagggggcgaaagcgttccatggtgggcacgctctgccccgtgaggcgggcgcagtcctgtacgctctagatggaaaaaagacagggcggtcatcgactcccttccgtagctcggggggtaaagtcgcaagggtgcggcggcggggaaccccggttcgaaaccggccggatccgccgctcccgatgcgcctggccccgcatccacgacgtccgcgccgagacccagccgcgacgctccgccccaatacggaggggagtcttttggtgttttttcgtagatgcatccggtgctgcggcagatgcgaccccagacgcccaccaccaccgccgcggcggcagtaaacctgagcggaggcggtgacagggaggaggaggagcccaccatggatctgctcaccggagtgcccaacagcatgcttcacagcccccaggtcgcccccaccctgcgccgtaaccaggaacacctgtatcgctttctggggaaacactctgcctattttcgccgccaccggcagcgcatcgaacgggccacggccttcgaaagcatgagccaaagagtgtaatcaataaaaaccatttttatttgacatgctacgagcttctggcgtttttattaaaaatcgaagggttcgagggaggggtcctcgtgcccactggggagggacacgttgcgatactggaaacgggcgctccaacgaaactcggggatcaccagccgcggcaggggcacgtcttctaggttctgcttccaaaactgccgcaccagctgcagggctcccatgacgtcgggcgccgatatcttgaagtcgcagttagggccggagctcccgcggctgttgcggaacacggggttggcacactggaacaccatcacgctggggttgtgaatactagccagggccgttgggtcggtcacctccgacgcatccagatcctcggcgttgctcagggcgaacggggtcagcttgcacatctgccgcccgatctggggcaccaggtcgggtttgttgaggcaatcgcagcgcagagggatcaggatgcgacgctgcccgcgttgcatgatagggtaactcgctgccaggaactcctccatctgacggaaggccatctgggctttcgtgccctcggtgaaaaagagcccacaggacttgctagagaatacgttattgccgcagttgatgtcttccgagcagcagcgggcgtcttcattcttcagctgaaccacgttgcgaccccagcggttctggaccaccttggctttcgtaggatgctccttcaacgcccgctgaccgttctcgctggtcacatccatttccaccacgtgctccttgcagaccatctccactccgtggaagcagaacaggacgccctcctgccgggtattgcgatgctcccacacggcgcacccggtgggctcccagctcttgcgtttcacccccgcgtatgcttccatgtaagccatgaggaatctgcccatcagctcggtgaaggtcttctggttggtgaaggtcagcggcaggccgcggtgctcctcgttcaaccaagtttgacagatcttgcggtacacggctccctggtcgggcagaaacttaaaagcccctctgctctcgttgtccacgtggaacttctccatcaacaccgtcatgacttccatgcccttctcccaggcagtcaccagcggcgcgctctcggggttcttcaccaacacggcggtggaggggccctcgccggccccgacgtccttcatggtcattctttgaaactccacggtgccgtccgcgcggcgtactctgcgcatcggagggtagctgaagcccacctccaccacggtgccttcgccctcgctgtcggagacaatctccggggatggcggcggcgcaagtgttgccttgcgagccttcttcttgggagggagcggaggcacctcctgctcgcgctcggggctcatctcccgcaagtagggggttatggagctgcctgcttggttctgacggttggccattgtatcctaggcagaaagacatggagcttatgcgcgaggaaactttaaccgccccgtcccccgtcagcgacgaagatgtcatcgtcgaacaggacccgggctacgttacgccgcccgaggatctggaggggcctgaccggcgcgacgctagtgagcggcaggaaaatgagaaagagaaggcacagggctgctaccttctggacggcgacgttttgctaaagcatttcgccaggcagagcaccatagtcaaggaggccttgcaagaccgctccgaggtgcccttggacgtcgccgcgctctcccaggcctacgaggcgaaccttttctcgccccgagtgcctccgaagagacagcccaacggcacctgcgagcccaacccgcgactcaacttctaccccgtattcgccgtgcccgaggcgctggccacctatcacatctttttcaaaaaccagcgcatccccctctcgtgccgggccaaccgcaccgcggccgataggaagctcaggcttaaaaacggagccgacatacctgatatcacgtcgctggaggaagtgcccaagattttcgagggtctgggtcgagatgaaaagcgggcggcgaacgctctgcagaaagaacagaaagagagtcagaacgtgctggtggagctggagggggacaacgcgcgtctggccgtcctcaaacgctgcatagaagtctcccacttcgcctaccccgccctcaacttgccacccaaagttatgaaatcggtcatggatcagctgctcatcaagagagctgagcccctggatcccgaccaccccgaggcggaaaactcagaggacggaaagcccgtcgtcagcgacgaggagctcgagcggtggctggaaaccagggacccccaacagttgcaagagaggcgcaagatgatgatggcggccgtgctggtcaccgtggagctggaatgcctgcaacggtttttcagcgacgtggagacgctacgcaaaatcggggagtccctgcactacaccttccgccagggctacgtccgccaggcctgcaagatctccaacgtggagctcagcaacctggtctcctacatgggcatcctccacgagaaccgactggggcagagcgtgctgcactgcaccttgcaaggcgaggcgcggcgggactacgtgcgagactgcatctacctcttcctcaccctcacctggcagaccgccatgggcgtctggcagcagtgcttggaagagagaaacctcaaagagctagacaaactcctctgccgccagcggcgcgccctgtggtccggtttcagcgagcgcacggtcgccagcgctctggcggacatcatcttcccggagcgcctgatgaaaaccttgcaaaacggcctgccggatttcatcagtcaaagcattttgcaaaacttccgctcttttgtcctggaacgctccgggattttgcccgccatgagctgcgcgctaccctctgactttgtccccctctcctaccgcgagtgccctcccccactgtggagccactgctacctcttccaactggccaactttctggcctaccactccgacctcatggaagacgtaagcggagagggtttactggagtgccactgccgctgcaacctgtgcaccccccacagatcgctggcctgcaacaccgagctgctcagcgaaacccaggtcataggtaccttcgagatccagggaccccagcagcaagagggtgcttccggcttgaagctcactccggcgctgtggacctcggcttacttacgcaaatttgtagccgaggactaccacgcccacaaaattcagttttacgaagaccaatctcgaccaccgaaagcccccctcacggcctgcgtcatcacccagagcaagatcctggcccaattgcaatccatcaaccaagcgcgccgagatttccttttgaaaaagggtcggggggtgtacttagacccccagaccggcgaggaactcaacccgtccacactctccgtcgaagcagcccccccgagacatgccgcccaagggaaccgccaagcagctgatcgctcggcagagagcgaagaagcaagagctgctccagcagcaggtggaggacgaggaagagctgtgggacagccaggcagaggaggtgtcagaggacgaggaggagatggaaagctgggacagcctaggcgaggaggaggacgagctttcagaggaagaggcgaccgaagaaaaaccacctgcatccagcgcgccttctctgagccgacagccgaagccccggcccccgacgcccccggccggctcactcaaagccagccgtaggtgggacgccaccggatctccagcggcagcggcagcgggtaaggccaaacgcgagcggcgggggtattgctcatggcgggcccacaaaagcagtatcgtgaactgcttgcaacactgcgggggaaacatctcctttgcccgacgctacctcctcttccatcacggtgtggccttccctcgcaacgttctctattattaccgtcatctctacagcccctacgaaacgctcggagaaaaaagctaaggcctcctctgccgcgaggaaaaactccgccgccgctgccgccaaggatccaccggccaccgaggagctgagaaagcgcatctttcccactctgtatgctatctttcagcaaagccgcgggcagcaccctcagcgcgaactgaaaataaaaaaccgctccttccgctcactcacccgcagctgtctgtaccacaagagagaagaccagctgcagcgcaccctggacgacgccgaagcactgttcagcaaatactgctcagcgtctcttaaagactaaaagacccgcgctttttccccctcggccgccaaaacccacgtcatcgccagcatgagcaaggagattcccaccccctacatgtggagttatcagccccagatgggtctggccgcgggcgccgcccaggactactccagcaagatgaactggctcagcgccggcccccacatgatctcacgagttaacggcatccgagcccaccgaaaccagattctcttagaacaggcggcaatcaccgccacaccccggcgccaactcaacccgcccagttggcccgccgcccaggtgtatcaggaaactccccgcccgaccacagtcctcctgccacgcgacgcggaggccgaagtcctcatgactaactctggggtacaattagcgggcgggtccaggtacgccaggtacagaggtcgggccgctccttactctcccgacttgtatacagggtgacctttctatgcccgtaccgtaccaaatacagtacaactatggaccaactggctactcctttaaatttatttggagaactgtttcaagacaaccatttgacatcccatgctgttttttctcttacattacggaagaataaaacaacttttcctttttattttctttttattttacacgcacagtaaggcttcctccgcccttccatttgacagcatacaccagcctctctcccttcatggcagtaaactgctgcgagccagtccggtatttgggagttaagatccaaacagtctctttggtaatcagatgtcgatccgtgatggacacaaatccctggggcaggttctccaacgtttcggtgaaaaactgcatgccgtcctacaaaacaaacaggttcaggctctccacgggttatctccccgatcaaactcagacagggtaaaggtgcgatgatgttccactaaaccacgcaggtggcgctgtctgaacctctcggtgcgactcctgtgaggctggtaagaagttagattgtccagcagcctcacagcatggatcatcagtctacgagtgcgtctggcgcagcagcgcatctgaatctcactgagattccggcaagaatcgcacaccatcacaatcaggttgttcatgatcccatagctgaacacgctccagccaaagctcattcgctccaacagcgccaccgcgtgtccgtccaaccttactttaacataaatcaggtgtctgccgcgtacaaacatgctacccgcatacagaacctcccggggcagtcccctgttcaccacctgcctgtaccagggaaacctcacatttatcagggagccatagatagccatcttaaaccaattagctaacaccgccccaccagctctacactgaagagaaccgggagagttacaatgacagtgaataatccatctctcataacccctaatggtctgatggaaatccagatctaacgtggcacagcagatacacactttcatatacattttcatcacatgtttttcccaggccgttaaaatacaatcccaatacacgggccactcctgcagtacaataaagctaatacaagatggtatactcctcacctcactaacattgtgcatgttcatattttcacattctaagtaccgagagttctcctctacaacagcactgccgcggtcctcacaaggtggtagctggtgacgattgtagggagccagtctgcagcgataccgtctgtcgcgttgcatcgtagaccagggaccgacgcacttcctcgtacttgtggtagcagaaccacgtccgccgccaacaggtctccacgtaacgccggtccctgcgtcgctcgcgctctctcctcagtgcaaagtgcaaccactcttgtaatccacacagatccctctcggcctccggggcgatgcacacctcaaacctacagatgtctcggtacagttccaaacacgtagtgagggcgagttccaaccaagacagacagcctgatctatcccgacacactggaggtggaggaagacacggaagaggcatgttattccaagcgattcaccaacgggtcgaaatgaagatcccgaagatgacaacggtcgcctccggagccctgatggaatttaacagccagatcaaacattatgcgattttccaggctatcaatcgcggcctccaaaagagcctggacccgcacttccacaaacaccagcaaagcaaaagcgttattatcaaactcttcgatcatcaagctgcaggactgtacaatgcccaagtaattttcatttctccactcgcgaatgatgtcgcggcaaatagtctgaaggttcatgccgtgcatattaaaaagctccgaaagggcgccctctatagccatgcgtagacacaccatcatgactgcaagatatcgggctcctgagacacctgcagcagatttaacagacccaggtcaggttgctctccgcgatcgcgaatctccatccgcaaggtcatttgcaaataattaaatagatctgcgccgactaaatctgttaactccgcgctaggaactaaatcaggtgtggctacgcagcacaaaagttccagggatggcgccaaactcactagaaccgctcccgagtagcaaaactgatgaatgggagtaacacagtgtaaaatgttcagccaaaaatcactaagctgctcctttaaaaagtccagtacttctatattcagtccgtgcaagtactgaagcaactgtgcgggaatatgcacagcaaaaaaaatagggcggctcagatacatgttgacctaaaataaaaataaacattaaactaaagaagcttggcgaacggtgggatatatgacacgctccagcagcaggcaagcaaccggctgtccccgggaaccgcggtaaaattcatccgaatgattaaaaagaacaacagaaacttcccaccatgtactcggttggatctcctgagcacacagcaatacccccctcacattcatatccgccacagaaaaaaaacgtcccagatacccagtgggaatatccaacgacagctgcaaagacagcaaaataatccctctgggagcaagcacaaaatcctccggtgaaaaaagaacatacatattagaataaccctgttgctggggcaaaaaggcccgacgtcccagcaaatgcacatatatatgttgatcagccattgccccgtcttaccgcgtataaagccacgaaaaagtcgagctaaaatccacccaacagcctatagctatatatacactccgcccaatgacgctaacaccgcaccacccacgaccaaagttcacccacacccacaaaacccgcgaaaatccagcgccgtcagcacttccgcaatttcagtctcacaacgtcacttccgcgcgccttttcactttcccacacacgcccttcgcccgccctcgcgccaccccgcgtcaccccgcgtcaccgggcctatgtggccaagcgcctcccacgctgccgcgtcagcgctgacgtaaatcacgtcataggggagtggtcctgtattagctgtcacgtgagtgcttttgcgacattttgcgacaccacgtggccatttgaggtatatatggccgagtgagcgagcaggatctccattttgaccgcgaaatttgaacgagcagcagccatgccgggtttctacgagatcgtgatcaaggtgccgagcgacctggacgagcacctgccgggcatttctgactcgtttgtgaactgggtggccgagaaggaatgggagctgcccccggattctgacatggatctgaatctgatcgagcaggcacccctgaccgtggccgagaagctgcagcgcgacttcctggtccaatggcgccgcgtgagtaaggctccggaggccctgttctttgttcagttcgagaagggcgagagctacttccaccttcacgttctggtggagaccacgggggtcaagtccatggtgctaggccgcttcctgagtcagattcgggagaagctggtccagaccatctaccgcggggtcgagcccacgctgcccaactggttcgcggtgaccaagacgcgtaatggcgccggcggggggaacaaggtggtggacgagtgctacatccccaactacctcctgcccaagacccagcccgagctgcagtgggcgtggactaacatggaggagtatataagcgcgtgtttgaacctggccgaacgcaaacggctcgtggcgcagcacctgacccacgtcagccagacgcaggagcagaacaaggagaatctgaaccccaattctgacgcgcccgtgatcaggtcaaaaacctccgcgcgctacatggagctggtcgggtggctggtggaccggggcatcacctccgagaagcagtggatccaggaggaccaggcctcgtacatctccttcaacgccgcctccaactcgcggtcccagatcaaggccgcgctggacaatgccggcaagatcatggcgctgaccaaatccgcgcccgactacctggtggggccctcgctgcccgcggacattaaaaccaaccgcatctaccgcatcctggagctgaacgggtacgatcctgcctacgccggctccgtctttctcggctgggcccagaaaaagttcgggaagcgcaacaccatctggctgtttgggcccgccaccaccggcaagaccaacattgcggaagccatcgcccacgccgtgcccttctacggctgcgtcaactggaccaatgagaactttcccttcaacgattgcgtcgacaagatggtgatctggtgggaggagggcaagatgacggccaaggtcgtggagtccgccaaggccattctcggcggcagcaaggtgcgcgtggaccaaaagtgcaagtcgtccgcccagatcgaccccacccccgtgatcgtcacctccaacaccaacatgtgcgccgtgattgacgggaacagcaccaccttcgagcaccagcagccgttgcaggaccggatgttcaaatttgaactcacccgccgtctggagcacgactttggcaaggtgacgaagcaggaagtcaaagagttcttccgctgggccagtgatcacgtgaccgaggtggcgcatgagttctacgtcagaaagggcggagccagcaaaagacccgcccccgatgacgcggatataagcgagcccaagcgggcctgcccctcagtcgcggatccatcgacgtcagacgcggaaggagctccggtggactttgccgacaggtaccaaaacaaatgttctcgtcacgcgggcatgattcagatgctgtttccctgcaaaacgtgcgagagaatgaatcagaatttcaacatttgcttcacacacggggtcagagactgtttagagtgtttccccggcgtgtcagaatctcaaccggtcgtcagaaaaaagacgtatcggaaactctgcgcgattcatcatctgctggggcgggcgcccgagattgcttgctcggcctgcgacctggtcaacgtggacctggacgactgcgtttctgagcaataaatgacttaaaccaggtggcctctatggccatggctgccgatggttatcttccagattggctcgaggacactctctctgaaggaataagacagtggtggaagctcaaacctggcccaccaccaccaaagcccgcagagcggcataaggacgacagcaggggtcttgtgcttcctgggtacaagtacctcggacccttcaacggactcgacaagggagagccggtcaacgaggcagacgccgcggccctcgagcacgacaaagcctacgaccggcagctcgacagcggagacaacccgtacctcaagtacaaccacgccgacgcggagtttcaggagcgccttaaagaagatacgtcttttgggggcaacctcggacgagcagtcttccaggcgaaaaagagggttcttgaacctctgggcctggttgaggaacctgttaagacggctccgggaaaaaagaggccggtagagcactctcctgtggagccagactcctcctcgggaaccggaaaggcgggccagcagcctgcaagaaaaagattgaattttggtcagactggagacgcagactcagtacctgacccccagcctctcggacagccaccagcagccccctctggtctgggaactaatacgatggctacaggcagtggcgcaccaatggcagacaataacgagggcgccgacggagtgggtaattcctcgggaaattggcattgcgattccacatggatgggcgacagagtcatcaccaccagcacccgaacctgggccctgcccacctacaacaaccacctctacaaacaaatttccagccaatcaggagcctcgaacgacaatcactactttggctacagcaccccttgggggtattttgacttcaacagattccactgccacttttcaccacgtgactggcaaagactcatcaacaacaactggggattccgacccaagagactcaacttcaagctctttaacattcaagtcaaagaggtcacgcagaatgacggtacgacgacgattgccaataaccttaccagcacggttcaggtgtttactgactcggagtaccagctcccgtacgtcctcggctcggcgcatcaaggatgcctcccgccgttcccagcagacgtcttcatggtgccacagtatggatacctcaccctgaacaacgggagtcaggcagtaggacgctcttcattttactgcctggagtactttccttctcagatgctgcgtaccggaaacaactttaccttcagctacacttttgaggacgttcctttccacagcagctacgctcacagccagagtctggaccgtctcatgaatcctctcatcgaccagtacctgtattacttgagcagaacaaacactccaagtggaaccaccacgcagtcaaggcttcagttttctcaggccggagcgagtgacattcgggaccagtctaggaactggcttcctggaccctgttaccgccagcagcgagtatcaaagacatctgcggataacaacaacagtgaatactcgtggactggagctaccaagtaccacctcaatggcagagactctctggtgaatccgggcccggccatggcaagccacaaggacgatgaagaaaagttttttcctcagagcggggttctcatctttgggaagcaaggctcagagaaaacaaatgtggacattgaaaaggtcatgattacagacgaagaggaaatcaggacaaccaatcccgtggctacggagcagtatggttctgtatctaccaacctccagagaggcaacagacaagcagctaccgcagatgtcaacacacaaggcgttcttccaggcatggtctggcaggacagagatgtgtaccttcaggggcccatctgggcaaagattccacacacggacggacattttcacccctctcccctcatgggtggattcggacttaaacaccctcctccacagattctcatcaagaacaccccggtacctgcgaatccttcgaccaccttcagtgcggcaaagtttgcttccttcatcacacagtactccacgggacaggtcagcgtggagatcgagtgggagctgcagaaggaaaacagcaaacgctggaatcccgaaattcagtacacttccaactacaacaagtctgttaatgtggactttactgtggacactaatggcgtgtattcagagcctcgccccattggcaccagatacctgactcgtaatctgttgcttgttaatcaataaaccgtttaattcgtttcagttgaactttggtctctgcgtatttctttcttatctagtttccatggctacgtagataagtagcatggcgggttaatcattaactacagcccgggcgtttaaacagcgggcggaggggtggagtcgtgacgtgaattacgtcatagggttagggaggtcctgtattagaggtcacgtgagtgttttgcgacattttgcgacaccatgtggtctcgctgggggggggggcccgagtgagcacgcagggtctccattttgaagcgggaggtttgaacgcggccgcaaaaggccttcttggccaccccgggccgtcgaccaattctcatgtttgacagcttatcatcgaatttctgccattcatccgcttattatcacttattcaggcgtagcaaccaggcgtttaagggcaccaataactgccttaaaaaaattacgccccgccctgccactcatcgcagtactgttgtaattcattaagcattctgccgacatggaagccatcacaaacggcatgatgaacctgaatcgccagcggcatcagcaccttgtcgccttgcgtataatatttgcccatggtgaaaacgggggcgaagaagttgtccatattggccacgtttaaatcaaaactggtgaaactcacccagggattggctgagacgaaaaacatattctcaataaaccctttagggaaataggccaggttttcaccgtaacacgccacatcttgcgaatatatgtgtagaaactgccggaaatcgtcgtggtattcactccagagcgatgaaaacgtttcagtttgctcatggaaaacggtgtaacaagggtgaacactatcccatatcaccagctcaccgtctttcattgccatacggaattccggatgagcattcatcaggcgggcaagaatgtgaataaaggccggataaaacttgtgcttatttttctttacggtctttaaaaaggccgtaatatccagctgaacggtctggttataggtacattgagcaactgactgaaatgcctcaaaatgttctttacgatgccattgggatatatcaacggtggtatatccagtgatttttttctccattttagcttccttagctcctgaaaatctcgataactcaaaaaatacgcccggtagtgatcttatttcattatggtgaaagttggaacctcttacgtgccgatcaacgtctcattttcgccaaaagttggcccagggcttcccggtatcaacagggacaccaggatttatttattctgcgaagtgatcttccgtcacaggtatttattcgcgataagctcatggagcggcgtaaccgtcgcacaggaaggacagagaaagcgcggatctgggaagtgacggacagaacggtcaggacctggattggggaggcggttgccgccgctgctgctgacggtgtgacgttctctgttccggtcacaccacatacgttccgccattcctatgcgatgcacatgctgtatgccggtataccgctgaaagttctgcaaagcctgatgggacataagtccatcagttcaacggaagtctacacgaaggtttttgcgctggatgtggctgcccggcaccgggtgcagtttgcgatgccggagtctgatgcggttgcgatgctgaaacaattatcctgagaataaatgccttggcctttatatggaaatgtggaactgagtggatatgctgtttttgtctgttaaacagagaagctggctgttatccactgagaagcgaacgaaacagtcgggaaaatctcccattatcgtagagatccgcattattaatctcaggagcctgtgtagcgtttataggaagtagtgttctgtcatgatgcctgcaagcggtaacgaaaacgatttgaatatgccttcaggaacaatagaaatcttcgtgcggtgttacgttgaagtggagcggattatgtcagcaatggacagaacaacctaatgaacacagaaccatgatgtggtctgtccttttacagccagtagtgctcgccgcagtcgagcgacagggcgaagccctcgagtgagcgaggaagcaccagggaacagcacttatatattctgcttacacacgatgcctgaaaaaacttcccttggggttatccacttatccacggggatatttttataattattttttttatagtttttagatcttcttttttagagcgccttgtaggcctttatccatgctggttctagagaaggtgttgtgacaaattgccctttcagtgtgacaaatcaccctcaaatgacagtcctgtctgtgacaaattgcccttaaccctgtgacaaattgccctcagaagaagctgttttttcacaaagttatccctgcttattgactcttttttatttagtgtgacaatctaaaaacttgtcacacttcacatggatctgtcatggcggaaacagcggttatcaatcacaagaaacgtaaaaatagcccgcgaatcgtccagtcaaacgacctcactgaggcggcatatagtctctcccgggatcaaaaacgtatgctgtatctgttcgttgaccagatcagaaaatctgatggcaccctacaggaacatgacggtatctgcgagatccatgttgctaaatatgctgaaatattcggattgacctctgcggaagccagtaaggatatacggcaggcattgaagagtttcgcggggaaggaagtggttttttatcgccctgaagaggatgccggcgatgaaaaaggctatgaatcttttccttggtttatcaaacgtgcgcacagtccatccagagggctttacagtgtacatatcaacccatatctcattcccttctttatcgggttacagaaccggtttacgcagtttcggcttagtgaaacaaaagaaatcaccaatccgtatgccatgcgtttatacgaatccctgtgtcagtatcgtaagccggatggctcaggcatcgtctctctgaaaatcgactggatcatagagcgttaccagctgcctcaaagttaccagcgtatgcctgacttccgccgccgcttcctgcaggtctgtgttaatgagatcaacagcagaactccaatgcgcctctcatacattgagaaaaagaaaggccgccagacgactcatatcgtattttccttccgcgatatcacttccatgacgacaggatagtctgagggttatctgtcacagatttgagggtggttcgtcacatttgttctgacctactgagggtaatttgtcacagttttgctgtttccttcagcctgcatggattttctcatactttttgaactgtaatttttaaggaagccaaatttgagggcagtttgtcacagttgatttccttctctttcccttcgtcatgtgacctgatacgcgtgctaccttaagagagtcaattcgcccttcccggtcgatatgaacagcttatttacataattcacgttattggtagttataaatgaaattcctaatatcggttatgaagtgaaattgaatttctacttgatctttctctctatttttgtaaaataaaattaagaatatttaaatattcaatgattcatttttgcagaaatcggaggaagaagaatatatgaaaacatttaacatttctcaacaagatccccccatattgttgtataagtgatgaaatactgaatttaaaacttagtttatatgtggtaaaatgttttaatcaagtttaggaggaattaattatgaagtgtaatgaataatgaatgtaacagggttcaattaaaagagggaagcgtatcattaaccctataaactacgtctgccctcattattggagggtgaaatgtgaatacatcctattcacaatcgaatttacgacacaaccaaattttaatttggctttgcattttatctttttttagcgtattaaatgaaatggttttgaacgtctcattacctgatattgcaaatgattttaataaaccaccagcgagtacaaactgggtgaacacagcctttatgttaaccttttccattggaacagctgtatatggaaagctatctgatcaattaggcatcaaaaggttactcctatttggaattataataaattgtttcgggtcggtaattgggtttgttggccattctttcttttccttacttattatggctcgttttattcaaggggctggtgcagctgcatttccagcactcgtaatggttgtagttgcgcgctatattccaaaggaaaataggggtaaagcatttggtcttattggatcgatagtagccatgggagaaggagtcggtccagcgattggtggaatgatagcccattatattcattggtcctatcttctactcattcctatgataacaattatcactgttccgtttcttatgaaattattaaagaaagaagtaaggataaaaggtcattttgatatcaaaggaattatactaatgtctgtaggcattgtattttttatgttgtttacaacatcatatagcatttcttttcttatcgttagcgtgctgtcattcctgatatttgtaaaacatatcaggaaagtaacagatccttttgttgatcccggattagggaaaaatataccttttatgattggagttctttgtgggggaattatatttggaacagtagcagggtttgtctctatggttccttatatgatgaaagatgttcaccagctaagtactgccgaaatcggaagtgtaattattttccctggaacaatgagtgtcattattttcggctacattggtgggatacttgttgatagaagaggtcctttatacgtgttaaacatcggagttacatttctttctgttagctttttaactgcttcctttcttttagaaacaacatcatggttcatgacaattataatcgtatttgttttaggtgggctttcgttcaccaaaacagttatatcaacaattgtttcaagtagcttgaaacagcaggaagctggtgctggaatgagtttgcttaactttaccagctttttatcagagggaacaggtattgcaattgtaggtggtttattatccatacccttacttgatcaaaggttgttacctatggaagttgatcagtcaacttatctgtatagtaatttgttattacttttttcaggaatcattgtcattagttggctggttaccttgaatgtatataaacattctcaaagggatttctaaatcgttaagggatcaactttgggagagagttcaaaattgatcctttttttataacaggaattgggcatcaaataaaacgaaaggctcagtcgaaagactgggcctttcgttttatctgttgtttgtcggtgaacgctctcctgagtaggacaaatccgccgggagcggatttgaacgttgcgaagcaacggcccggagggtggcgggcaggacgcccgccataaactgccaggcatcaaattaagcagaaggccatcctgacggatggcctttttgcgtttctacaaactcttcctgtcgtcatatctacaattctacacagcccagtccagactattcggcactgaaattatgggtgaagtggtcaagacctcactaggcaccttaaaaatagcgcaccctgaagaagatttatttgaggtagcccttgcctacctagcttccaagaaagatatcctaacagcacaagagcggaaagatgttttgttctacatccagaacaacctctgctaaaattcctgaaaaattttgcaaaaagttgttgactttatctacaaggtgtggcataatgtgtggaattgtgagcggataacaattaagctaattctatggtaaaagcattcctgaacccaatatccttatttttagtggacaaggccttgttctcatatggttgcttgagccagtgccttacaaggctcttccgctttggcaggctgttcaaaattatttattagagcaactcaaggaactaggcggagatccaaaagcaaccgatgcagcacgtgtttttcggattgctgggagcgtcaatagtaagaatggagcggaagtaagagcggaatatcggcacgattacagatatgagttaaggcagattcaatttgattaccttccagaactcaatgaggttattaatcccgctccacaaaagaaaaaacgggggcgtaaaaagaaagtagttcagttattcaatacctacaaactccattacgctcgcctattggatatagtgaaattggtggaactacgaaattatgaggtaactggatacagggaaatcatttgctttttataccgttattggttgtgctgttacacgaacgaccctgtagaggctttaaatcaaacacagacacttaatttacagttcactgagcctttacccttaaaagaggttgaaagggctacacggagcgcagaaaaggcgtgggaagcacgaaataacgaagaggctaaccggattgcaatcgaaaaaggatatcccagtgctggatacaatattagcaataaaaagttgattgaatggctagatatcacaccagaagaacagaagcatttacagacgattatagacgctaatgagaaacggagaagaaagcgggaaagggataggatttatcaagaacaaaaacgtcgtgagcggggagatatgacccgacaggagtatattaagcaacaacaggataaaacagatgataaattatttaaattgcaggagttattagaacagaatcccaaaatctcaaaaattaaattagcaaaaatacttggtgtagataaatcgcacttatacagactgctgaaacaactataactggaaaaaattagtgtctcatggttcgtcgcccttatattatgggcgttagcctgcttgctaattggataggtgttattgtcatttcaacgtcggacgttttggtagatgaacgtcggacgttatttgcttcaatagattgttgatgtattaagggttgcagtgaatcgacaagcaaaaagttatgacgttgtgaaaaaattgaatagaaaattggaaattacgtcggacgttctaacttaaaaaccctgttatatcaatgatttaaaaggaaattaacgtcataaaagacctttctgcaacaaaagtttttctggaagagttgaggttattttataggtattatggacttttgtagactttttgtgtactttttgtggactccacactcgctggtatcgtgttattttttaattgagatatgaatatggaaattaaacgttttaggcgttggtttggtgatgacaaaaaaataagagtacccgctcacaacggatactctttcgagaaatgtacgaaacgctataaataaaaaataactagatacatttacattgtatcacgtttcgtacatttctccaataacaaattgattggaggaatgcaaagtgaataatgaaccagtaaaacgtggtaagaagaacagatgggaattaaacctacctataatgacttatgtagtagctgatgattggattgataaactaggacacgaaacgtttactttatggttgaggttccatacttgggtagatagagaagatgaactccgagattatgatcgcatacctagaagttttgagaacatatataaaaagacactaggaatctcaaaaagtaagttttatagattgataaaacctttatgggaatatggattaatagacatcatagaatacgaagaatctaaccgtaattctactaaacctaaaaatataattgtttatgagtatcctttacacgaaatagaaagaaagtataaaccactagaaaaattaagagattgggataaagactataattccgtttctaaagaattaggtaaaacaggtggtagaccaaggaaaaaagatagtgaagaagaacccgaaaagaaacccgaagaagtaactaaaaagaaacgtaaatataagttaaaaagagttatccacaacggtttcaaaaatgaaacggtggagggtttcaaaaatgaaacggtggagggtttcaaaaatgaaacggtgaccgtttcaaaaataaaacccaataattattcaaatatctttaataacttatcaaatatttctactaatgtttcaaataatttattaattgatgatgatgaggaaatcgaaaatgaaccaactggtcgtacaataaataggtcattacttttttcacaagaagatattaaacaggcctatcaatttattaatagattttcagttatacagttacgtgaaaactttagctttgataaacactttgaagaacggttggtatgttatttatggaaagcagggatttctactttttacacgcacgaaatcagtaaaatgataaaaaaaatagcagactatgaaaaatctaaaaaaggtagattaaacccaatacgtgaccgagccttatatatggtaaatggtcttgtaatgaatagagcttcttcccaaagtgaacatgctacttataaactaaaccaatataaaaaacagaaggaacaggaaaaacaacaacaggagcaacaaagatcaagagtaccgttctataattggttggaggaaagagaagaacaaaccgaaggtcaactacccaccacttaaagcctaacggcttttgaagtggggcttgtaaaaagccctagttgactaccccaagtctttcgaggactacgttggaaaggtcatgacacctacaaatgctcctctagttcgtagccactgtcgttgatggttaaaagtcctgatgggtagggacggtgctgtcaacatcacaagcccttccaacatgggggaagaggaagaacactccgagaaaggagggggctgtcgtacacgccttgttcgtgtacgtgatttttaacacttttatctctaatataatctctccttgagttagcagagactaagaataaaacacattaggattttttatctacataaggaggttcaatacatgcctactatttcgtttaagggaaagtcttttgtacaaaatcatcacttgactgtaaaatatcatgaattgatcccagaaccagaaaaaagtctgaccgataaagttagtcttcatgacaatcttatcattcatggggacaatttaaaggcgttgaaagctctactacctacatatgctggtaagatagattgcatctatattgacccaccatacaatactggaactgaaaaatggatttataatgataatgtcaactccccaatgattagggaatggcttggaaaagtggtagacaaagaagacttatcccgacatgataagtggctttgtatgatgatgccgaggttaaaactgttgaaagagttgttgtcagaagacggagtgatatttgtaagcattgactacaatgaaatacaccatcttacgtgccttatgaacgaaatattcggtgaggagaattttcgtgacgctattatcattcgtagaggagtaaaaaatgttcaagcgcaatttgacacaattgattctctttcaaatggttatgagtctattttggtttacactaaacagccatctcgacgatttaataaggtttatgaagatgtagaagaaaagcctggtagttggaataatcattggagaggtacagaccgtaaaactatgagatatgaattatttggggttactccgacagaaggtcaatggagatgggggaaagaacgtagtctccaggctattgaaaactatcaaatgatgttagatgaacttagacaaaaaggcattactaatccaactcaagaggatattgataaatggtatcttgaatatgtagaaaataatggggaagatattgacttgttacgacaaaatgataatggcacgattgagcactttgttccaccgactagcaaaaagttgttaagtaatgcctggtttgacttaaaacccaacggttctagtcaattaaagaagatatttggaaggaaggttttcgataaccctaaatcaattgatttggtaaaaagactaatacaatttgcgactgaaaacaaagaagcgattgtacttgactcatttgcagggagtggcactactgctcatgcagtattatcgcttaacaaacaagatggagggaatcgtcgtttcatccttattgagatggaagaatatgcacatgagattaccgcagaacgcggatctttatcgatttgcatgcaagctaattcggtggaaacgaggtcatcatttccttccgaaaaaacggttgcatttaaatcttacatatgtaatactttcaaagactacatttgtaagatttgatgtttgagtcggctgaaagatcgtacgtaccaattattgtttcgtgattgttcaagccataacactgtagggatagtggaaagagtgcttcatctggttacgatcaatcaaatattcaaacggagggagacgattttgatgaaaccagtaacgttatacgatgtcgcagagtatgccggtgtctcttatcagaccgtttcccgcgtggtgaaccaggccagccacgtttctgcgaaaacgcgggaaaaagtggaagcggcgatggcggagctgaattacattcccaaccgcgtggcacaacaactggcgggcaaacagtcgttgctgattggcgttgccacctccagtctggccctgcacgcgccgtcgcaaattgtcgcggcgattaaatctcgcgccgatcaactgggtgccagcgtggtggtgtcgatggtagaacgaagcggcgtcgaagcctgtaaaacggcggtgcacaatcttctcgcgcaacgcgtcagtgggctgatcattaactatccgctggatgaccaggatgccattgctgtggaagctgcctgcactaatgttccggcgttatttcttgatgtctctgaccagacacccatcaacagtattattttctcccatgaagacggtacgcgactgggcgtggagcatctggtcgcattgggtcaccagcaaatcgcgctgttagcgggcccattaagttctgtctcggcgcgtctgcgtctggctggctggcataaatatctcactcgcaatcaaattcagccgatagcggaacgggaaggcgactggagtgccatgtccggttttcaacaaaccatgcaaatgctgaatgagggcatcgttcccactgcgatgctggttgccaacgatcagatggcgctgggcgcaatgcgcgccattaccgagtccgggctgcgcgttggtgcggatatctcggtagtgggatacgacgataccgaagacagctcatgttatatcccgccgttaaccaccatcaaacaggattttcgcctgctggggcaaaccagcgtggaccgcttgctgcaactctctcagggccaggcggtgaagggcaatcagctgttgcccgtctcactggtgaaaagaaaaaccaccctggcgcccaatacgcaaaccgcctctccccgcgcgttggccgattcattaatgcagctggcacgacaggtttcccgactggaaagcgggcagtgagcgcaacgcaattaatgtgagttaggatcgctaccttaagagagacgcgttatcgggggttagttcgtcatcattgatgagggttgattatcacagtttattactctgaattggctatccgcgtgtgtacctctacctggagtttttcccacggtggatatttcttcttgcgctgagcgtaagagctatctgacagaacagttcttctttgcttcctcgccagttcgctcgctatgctcggttacacggctgcggcgagcgctagtgataataagtgactgaggtatgtgctcttcttatctccttttgtagtgttgctcttattttaaacaactttgcggttttttgatgactttgcgattttgttgttgctttgcagtaaattgcaagatttaataaaaaaacgcaaagcaatgattaaaggatgttcagaatgaaactcatggaaacacttaaccagtgcataaacgctggtcatgaaatgacgaaggctatcgccattgcacagtttaatgatgacagcccggaagcgaggaaaataacccggcgctggagaataggtgaagcagcggatttagttggggtttcttctcaggctatcagagatgccgagaaagcagggcgactaccgcacccggatatggaaattcgaggacgggttgagcaacgtgttggttatacaattgaacaaattaatcatatgcgtgatgtgtttggtacgcgattgcgacgtgctgaagacgtatttccaccggtgatcggggttgctgcccataaaggtggcgtttacaaaacctcagtttctgttcatcttgctcaggatctggctctgaaggggctacgtgttttgctcgtggaaggtaacgacccccagggaacagcctcaatgtatcacggatgggtaccagatcttcatattcatgcagaagacactctcctgcctttctatcttggggaaaaggacgatgtcacttatgcaataaagcccacttgctggccggggcttgacattattccttcctgtctggctctgcaccgtattgaaactgagttaatgggcaaatttgatgaaggtaaactgcccaccgatccacacctgatgctccgactggccattgaaactgttgctcatgactatgatgtcatagttattgacagcgcgcctaacctgggtatcggcacgattaatgtcgtatgtgctgctgatgtgctgattgttcccacgcctgctgagttgtttgactacacctccgcactgcagtttttcgatatgcttcgtgatctgctcaagaacgttgatcttaaagggttcgagcctgatgtacgtattttgcttaccaaatacagcaatagtaatggctctcagtccccgtggatggaggagcaaattcgggatgcctggggaagcatggttctaaaaaatgttgtacgtgaaacggatgaagttggtaaaggtcagatccggatgagaactgtttttgaacaggccattgatcaacgctcttcaactggtgcctggagaaatgctctttctatttgggaacctgtctgcaatgaaattttcgatcgtctgattaaaccacgctgggagattagataatgaagcgtgcgcctgttattccaaaacatacgctcaatactcaaccggttgaagatacttcgttatcgacaccagctgccccgatggtggattcgttaattgcgcgcgtaggagtaatggctcgcggtaatgccattactttgcctgtatgtggtcgggatgtgaagtttactcttgaagtgctccggggtgatagtgttgagaagacctctcgggtatggtcaggtaatgaacgtgaccaggagctgcttactgaggacgcactggatgatctcatcccttcttttctactgactggtcaacagacaccggcgttcggtcgaagagtatctggtgtcatagaaattgccgatgggagtcgccgtcgtaaagctgctgcacttaccgaaagtgattatcgtgttctggttggcgagctggatgatgagcagatggctgcattatccagattgggtaacgattatcgcccaacaagtgcttatgaacgtggtcagcgttatgcaagccgattgcagaatgaatttgctggaaatatttctgcgctggctgatgcggaaaatatttcacgtaagattattacccgctgtatcaacaccgccaaattgcctaaatcagttgttgctcttttttctcaccccggtgaactatctgcccggtcaggtgatgcacttcaaaaagcctttacagataaagaggaattacttaagcagcaggcatctaaccttcatgagcagaaaaaagctggggtgatatttgaagctgaagaagttatcactcttttaacttctgtgcttaaaacgtcatctgcatcaagaactagtttaagctcacgacatcagtttgctcctggagcgacagtattgtataagggcgataaaatggtgcttaacctggacaggtctcgtgttccaactgagtgtatagagaaaattgaggccattcttaaggaacttgaaaagccagcaccctgatgcgaccacgttttagtctacgtttatctgtctttacttaatgtcctttgttacaggccagaaagcataactggcctgaatattctctctgggcccactgttccacttgtatcgtcggtctgataatcagactgggaccacggtcccactcgtatcgtcggtctgattattagtctgggaccacggtcccactcgtatcgtcggtctgattattagtctgggaccacggtcccactcgtatcgtcggtctgataatcagactgggaccacggtcccactcgtatcgtcggtctgattattagtctgggaccatggtcccactcgtatcgtcggtctgattattagtctgggaccacggtcccactcgtatcgtcggtctgattattagtctggaaccacggtcccactcgtatcgtcggtctgattattagtctgggaccacggtcccactcgtatcgtcggtctgattattagtctgggaccacgatcccactcgtgttgtcggtctgattatcggtctgggaccacggtcccacttgtattgtcgatcagactatcagcgtgagactacgattccatcaatgcctgtcaagggcaagtattgacatgtcgtcgtaacctgtagaacggagtaacctcggtgtgcggttgtatgcctgctgtggattgctgctgtgtcctgcttatccacaacattttgcgcacggttatgtggacaaaatacctggttacccaggccgtgccggcacgttaaccgggctgcatccgatgcaagtgtgtcgctgtcgacgagctcgcgagctcggacatgaggttgccccgtattcagtgtcgctgatttgtattgtctgaagttgtttttacgttaagttgatgcagatcaattaatacgatacctgcgtcataattgattatttgacgtggtttgatggcctccacgcacgttgtgatatgtagatgataatcattatcactttacgggtcctttccggtgatccgacaggttacggggcggcgacctcgcgggttttcgctatttatgaaaattttccggtttaaggcgtttccgttcttcttcgtcataacttaatgtttttatttaaaataccctctgaaaagaaaggaaacgacaggtgctgaaagcgagctttttggcctctgtcgtttcctttctctgtttttgtccgtggaatgaacaatggaagtccgagctcatcgctaataacttcgtatagcatacattatacgaagttatattcgat

SEQ ID NO: 168 - DNA, 21 bp, synthetic construct
  misc_feature 1..21: note = primer
  source 1..21: mol_type = other DNA
ggaacccctagtgatggagtt

SEQ ID NO: 169 - DNA, 16 bp, synthetic construct
  misc_feature 1..16: note = primer
  source 1..16: mol_type = other DNA
cggcctcagtgagcga

SEQ ID NO: 170 - DNA, 31764 bp, synthetic construct
  misc_feature 1..31764: note = pGETS103-AAV-Helper-RC2
  source 1..31764: mol_type = other DNA
ttctcatgtttgacagcttatcatcgataagcttgcctgcaggcagctgcgcgctcgctcgctcactgaggccgcccgggcaaagcccgggcgtcgggcgacctttggtcgcccggcctcagtgagcgagcgagcgcgcagagagggagtggccaactccatcactaggggttcctatcgatatcaagctttaatagtaatcaattacggggtcattagttcatagcccatatatggagttccgcgttacataacttacggtaaatggcccgcctggctgaccgcccaacgacccccgcccattgacgtcaataatgacgtatgttcccatagtaacgccaatagggactttccattgacgtcaatgggtggagtatttacggtaaactgcccacttggcagtacatcaagtgtatcatatgccaagtacgccccctattgacgtcaatgacggtaaatggcccgcctggcattatgcccagtacatgaccttatgggactttcctacttggcagtacatctacgtattagtcatcgctattaccatggtgatgcggttttggcagtacatcaatgggcgtggatagcggtttgactcacggggatttccaagtctccaccccattgacgtcaatgggagtttgttttggcaccaaaatcaacgggactttccaaaatgtcgtaacaactccgccccattgacgcaaatgggcggtaggcgtgtacggtgggaggtctatataagcagagctggtttagtggatatccttaagggcccagccggcccgaatcccggccgggaacggtgcattggaacgcggattccccgtgccaagagtgacgtaagtaccgcctatagagtctataggcccacaaaaaatgctttcttcttttaatatacttttttgtttatcttatttctaatactttccctaatctctttctttcagggcaataatgatacaatgtatcatgcctctttgcaccattctaaagaataacagtgataatttctgggttaaggcaatagcaatatttctgcatataaatatttctgcatataaattgtaactgatgtaagaggtttcatattgctaatagcagctacaatccagctaccattctgcttttattttatggttgggataaggctggattattctgagtccaagctaggcccttttgctaatcatgttcatacctcttatcttcctcccacagctcctgggcaacgtgctggtctgtgtgctggcccatcactttggcaaagaattgggattcgcgagaattctctagagtcgacactagtgcggatccacgggtggcatccctgtgacccctccccagtgcctctcctggccctggaagttgccactccagtgcccaccagccttgtcctaataaaattaagttgcatcattttgtctgactaggtgtccttctataatattatggggtggaggggggtggtatggagcaaggggcaagttgggaagacaacctgtagggcctgcggggtctattgggaaccaagctggagtgcagtggcacaatcttggctcactgcaatctccgcctcctgggttcaagcgattctcctgcctcagcctcccgagttgttgggattccaggcatgcatgaccaggctcagctaatttttgtttttttggtagagacggggtttcaccatattggccaggctggtctccaactcctaatctcaggtgatctacccaccttggcctcccaaattgctgggattacaggcgtgaaccactgctcccttccctgtccttatcgatagatctaggaacccctagtgatggagttggccactccctctctgcgcgctcgctcgctcactgaggccgggcgaccaaaggtcgcccgacgcccgggctttgcccgggcggcctcagtgagcgagcgagcgcgcagctgcctgcaggcagatccggtacccaactccatgcttaacagtccccaggtacagcccaccctgcgtcgcaaccaggaacagctctacagcttcctggagcgccactcgccctacttccgcagccacagtgcgcagattaggagcgccacttctttttgtcacttgaaaaacatgtaaaaataatgtactaggagacactttcaataaaggcaaatgtttttatttgtacactctcgggtgattatttaccccccacccttgccgtctgcgccgtttaaaaatcaaaggggttctgccgcgcatcgctatgcgccactggcagggacacgttgcgatactggtgtttagtgctccacttaaactcaggcacaaccatccgcggcagctcggtgaagttttcactccacaggctgcgcaccatcaccaacgcgtttagcaggtcgggcgccgatatcttgaagtcgcagttggggcctccgccctgcgcgcgcgagttgcgatacacagggttgcagcactggaacactatcagcgccgggtggtgcacgctggccagcacgctcttgtcggagatcagatccgcgtccaggtcctccgcgttgctcagggcgaacggagtcaactttggtagctgccttcccaaaaagggtgcatgcccaggctttgagttgcactcgcaccgtagtggcatcagaaggtgaccgtgcccggtctgggcgttaggatacagcgcctgcatgaaagccttgatctgcttaaaagccacctgagcctttgcgccttcagagaagaacatgccgcaagacttgccggaaaactgattggccggacaggccgcgtcatgcacgcagcaccttgcgtcggtgttggagatctgcaccacatttcggccccaccggttcttcacgatcttggccttgctagactgctccttcagcgcgcgctgcccgttttcgctcgtcacatccatttcaatcacgtgctccttatttatcataatgctcccgtgtagacacttaagctcgccttcgatctcagcgcagcggtgcagccacaacgcgcagcccgtgggctcgtggtgcttgtaggttacctctgcaaacgactgcaggtacgcctgcaggaatcgccccatcatcgtcacaaaggtcttgttgctggtgaaggtcagctgcaacccgcggtgctcctcgtttagccaggtcttgcatacggccgccagagcttccacttggtcaggcagtagcttgaagtttgcctttagatcgttatccacgtggtacttgtccatcaacgcgcgcgcagcctccatgcccttctcccacgcagacacgatcggcaggctcagcgggtttatcaccgtgctttcactttccgcttcactggactcttccttttcctcttgcgtccgcataccccgcgccactgggtcgtcttcattcagccgccgcaccgtgcgcttacctcccttgccgtgcttgattagcaccggtgggttgctgaaacccaccatttgtagcgccacatcttctctttcttcctcgctgtccacgatcacctctggggatggcgggcgctcgggcttgggagaggggcgcttctttttctttttggacgcaatggccaaatccgccgtcgaggtcgatggccgcgggctgggtgtgcgcggcaccagcgcatcttgtgacgagtcttcttcgtcctcggactcgagacgccgcctcagccgcttttttgggggcgcgcggggaggcggcggcgacggcgacggggacgacacgtcctccatggttggtggacgtcgcgccgcaccgcgtccgcgctcgggggtggtttcgcgctgctcctcttcccgactggccatttccttctcctataggcagaaaaagatcatggagtcagtcgagaaggaggacagcctaaccgccccctttgagttcgccaccaccgcctccaccgatgccgccaacgcgcctaccaccttccccgtcgaggcacccccgcttgaggaggaggaagtgattatcgagcaggacccaggttttgtaagcgaagacgacgaggatcgctcagtaccaacagaggataaaaagcaagaccaggacgacgcagaggcaaacgaggaacaagtcgggcggggggaccaaaggcatggcgactacctagatgtgggagacgacgtgctgttgaagcatctgcagcgccagtgcgccattatctgcgacgcgttgcaagagcgcagcgatgtgcccctcgccatagcggatgtcagccttgcctacgaacgccacctgttctcaccgcgcgtaccccccaaacgccaagaaaacggcacatgcgagcccaacccgcgcctcaacttctaccccgtatttgccgtgccagaggtgcttgccacctatcacatctttttccaaaactgcaagatacccctatcctgccgtgccaaccgcagccgagcggacaagcagctggccttgcggcagggcgctgtcatacctgatatcgcctcgctcgacgaagtgccaaaaatctttgagggtcttggacgcgacgagaaacgcgcggcaaacgctctgcaacaagaaaacagcgaaaatgaaagtcactgtggagtgctggtggaacttgagggtgacaacgcgcgcctagccgtgctgaaacgcagcatcgaggtcacccactttgcctacccggcacttaacctaccccccaaggttatgagcacagtcatgagcgagctgatcgtgcgccgtgcacgacccctggagagggatgcaaacttgcaagaacaaaccgaggagggcctacccgcagttggcgatgagcagctggcgcgctggcttgagacgcgcgagcctgccgacttggaggagcgacgcaagctaatgatggccgcagtgcttgttaccgtggagcttgagtgcatgcagcggttctttgctgacccggagatgcagcgcaagctagaggaaacgttgcactacacctttcgccagggctacgtgcgccaggcctgcaaaatttccaacgtggagctctgcaacctggtctcctaccttggaattttgcacgaaaaccgcctcgggcaaaacgtgcttcattccacgctcaagggcgaggcgcgccgcgactacgtccgcgactgcgtttacttatttctgtgctacacctggcaaacggccatgggcgtgtggcagcaatgcctggaggagcgcaacctaaaggagctgcagaagctgctaaagcaaaacttgaaggacctatggacggccttcaacgagcgctccgtggccgcgcacctggcggacattatcttccccgaacgcctgcttaaaaccctgcaacagggtctgccagacttcaccagtcaaagcatgttgcaaaactttaggaactttatcctagagcgttcaggaattctgcccgccacctgctgtgcgcttcctagcgactttgtgcccattaagtaccgtgaatgccctccgccgctttggggtcactgctaccttctgcagctagccaactaccttgcctaccactccgacatcatggaagacgtgagcggtgacggcctactggagtgtcactgtcgctgcaacctatgcaccccgcaccgctccctggtctgcaattcgcaactgcttagcgaaagtcaaattatcggtacctttgagctgcagggtccctcgcctgacgaaaagtccgcggctccggggttgaaactcactccggggctgtggacgtcggcttaccttcgcaaatttgtacctgaggactaccacgcccacgagattaggttctacgaagaccaatcccgcccgccaaatgcggagcttaccgcctgcgtcattacccagggccacatccttggccaattgcaagccatcaacaaagcccgccaagagtttctgctacgaaagggacggggggtttacctggacccccagtccggcgaggagctcaacccaatccccccgccgccgcagccctatcagcagccgcgggcccttgcttcccaggatggcacccaaaaagaagctgcagctgccgccgccgccacccacggacgaggaggaatactgggacagtcaggcagaggaggttttggacgaggaggaggagatgatggaagactgggacagcctagacgaagcttccgaggccgaagaggtgtcagacgaaacaccgtcaccctcggtcgcattcccctcgccggcgccccagaaattggcaaccgttcccagcatcgctacaacctccgctcctcaggcgccgccggcactgcctgttcgccgacccaaccgtagatgggacaccactggaaccagggccggtaagtctaagcagccgccgccgttagcccaagagcaacaacagcgccaaggctaccgctcgtggcgcgggcacaagaacgccatagttgcttgcttgcaagactgtgggggcaacatctccttcgcccgccgctttcttctctaccatcacggcgtggccttcccccgtaacatcctgcattactaccgtcatctctacagcccctactgcaccggcggcagcggcagcggcagcaacagcagcggtcacacagaagcaaaggcgaccggatagcaagactctgacaaagcccaagaaatccacagcggcggcagcagcaggaggaggagcgctgcgtctggcgcccaacgaacccgtatcgacccgcgagcttagaaataggatttttcccactctgtatgctatatttcaacaaagcaggggccaagaacaagagctgaaaataaaaaacaggtctctgcgctccctcacccgcagctgcctgtatcacaaaagcgaagatcagcttcggcgcacgctggaagacgcggaggctctcttcagcaaatactgcgcgctgactcttaaggactagtttcgcgccctttctcaaatttaagcgcgaaaactacgtcatctccagcggccacacccggcgccagcacctgtcgtcagcgccattatgagcaaggaaattcccacgccctacatgtggagttaccagccacaaatgggacttgcggctggagctgcccaagactactcaacccgaataaactacatgagcgcgggaccccacatgatatcccgggtcaacggaatccgcgcccaccgaaaccgaattctcctcgaacaggcggctattaccaccacacctcgtaataaccttaatccccgtagttggcccgctgccctggtgtaccaggaaagtcccgctcccaccactgtggtacttcccagagacgcccaggccgaagttcagatgactaactcaggggcgcagcttgcgggcggctttcgtcacagggtgcggtcgcccgggcgttttagggcggagtaacttgcatgtattgggaattgtagtttttttaaaatgggaagtgacgtatcgtgggaaaacggaagtgaagatttgaggaagttgtgggttttttggctttcgtttctgggcgtaggttcgcgtgcggttttctgggtgttttttgtggactttaaccgttacgtcattttttagtcctatatatactcgctctgtacttggccctttttacactgtgactgattgagctggtgccgtgtcgagtggtgttttttaataggtttttttactggtaaggctgactgttatggctgccgctgtggaagcgctgtatgttgttctggagcgggagggtgctattttgcctaggcaggagggtttttcaggtgtttatgtgtttttctctcctattaattttgttatacctcctatgggggctgtaatgttgtctctacgcctgcgggtatgtattcccccgggctatttcggtcgctttttagcactgaccgatgttaaccaacctgatgtgtttaccgagtcttacattatgactccggacatgaccgaggaactgtcggtggtgctttttaatcacggtgaccagtttttttacggtcacgccggcatggccgtagtccgtcttatgcttataagggttgtttttcctgttgtaagacaggcttctaatgtttaaatgtttttttttttgttattttattttgtgtttaatgcaggaacccgcagacatgtttgagagaaaaatggtgtctttttctgtggtggttccggaacttacctgcctttatctgcatgagcatgactacgatgtgcttgcttttttgcgcgaggctttgcctgattttttgagcagcaccttgcattttatatcgccgcccatgcaacaagcttacataggggctacgctggttagcatagctccgagtatgcgtgtcataatcagtgtgggttcttttgtcatggttcctggcggggaagtggccgcgctggtccgtgcagacctgcacgattatgttcagctggccctgcgaagggacctacgggatcgcggtatttttgttaatgttccgcttttgaatcttatacaggtctgtgaggaacctgaatttttgcaatcatgattcgctgcttgaggctgaaggtggagggcgctctggagcagatttttacaatggccggacttaatattcgggatttgcttagagacatattgataaggtggcgagatgaaaattatttgggcatggttgaaggtgctggaatgtttatagaggagattcaccctgaagggtttagcctttacgtccacttggacgtgagggcagtttgccttttggaagccattgtgcaacatcttacaaatgccattatctgttctttggctgtagagtttgaccacgccaccggaggggagcgcgttcacttaatagatcttcattttgaggttttggataatcttttggaataaaaaaaaaaaaacatggttcttccagctcttcccgctcctcccgtgtgtgactcgcagaacgaatgtgtaggttggctgggtgtggcttattctgcggtggtggatgttatcagggcagcggcgcatgaaggagtttacatagaacccgaagccagggggcgcctggatgctttgagagagtggatatactacaactactacacagagcgagctaagcgacgagaccggagacgcagatctgtttgtcacgcccgcacctggttttgcttcaggaaatatgactacgtccggcgttccatttggcatgacactacgaccaacacgatctcggttgtctcggcgcactccgtacagtagggatcgcctacctccttttgagacagagacccgcgctaccatactggaggatcatccgctgctgcccgaatgtaacactttgacaatgcacaacgtgagttacgtgcgaggtcttccctgcagtgtgggatttacgctgattcaggaatgggttgttccctgggatatggttctgacgcgggaggagcttgtaatcctgaggaagtgtatgcacgtgtgcctgtgttgtgccaacattgatatcatgacgagcatgatgatccatggttacgagtcctgggctctccactgtcattgttccagtcccggttccctgcagtgcatagccggcgggcaggttttggccagctggtttaggatggtggtggatggcgccatgtttaatcagaggtttatatggtaccgggaggtggtgaattacaacatgccaaaagaggtaatgtttatgtccagcgtgtttatgaggggtcgccacttaatctacctgcgcttgtggtatgatggccacgtgggttctgtggtccccgccatgagctttggatacagcgccttgcactgtgggattttgaacaatattgtggtgctgtgctgcagttactgtgctgatttaagtgagatcagggtgcgctgctgtgcccggaggacaaggcgtctcatgctgcgggcggtgcgaatcatcgctgaggagaccactgccatgttgtattcctgcaggacggagcggcggcggcagcagtttattcgcgcgctgctgcagcaccaccgccctatcctgatgcacgattatgactctacccccatgtaggcgtggacttccccttcgccgcccgttgagcaaccgcaagttggacagcagcctgtggctcagcagctggacagcgacatgaacttaagcgagctgcccggggagtttattaatatcactgatgagcgtttggctcgacaggaaaccgtgtggaatataacacctaagaatatgtctgttacccatgatatgatgctttttaaggccagccggggagaaaggactgtgtactctgtgtgttgggagggaggtggcaggttgaatactagggttctgtgagtttgattaaggtacggtgatcaatataagctatgtggtggtggggctatactactgaatgaaaaatgacttgaaattttctgcaattgaaaaataaacacgttgaaacataacatgcaacaggttcacgattctttattcctgggcaatgtaggagaaggtgtaagagttggtagcaaaagtttcagtggtgtattttccactttcccaggaccatgtaaaagacatagagtaagtgcttacctcgctagtttctgtggattcactagaatcgatgtaggatgttgcccctcctgacgcggtaggagaaggggagggtgccctgcatgtctgccgctgctcttgctcttgccgctgctgaggaggggggcgcatctgccgcagcaccggatgcatctgggaaaagcaaaaaaggggctcgtccctgtttccggaggaatttgcaagcggggtcttgcatgacggggaggcaaacccccgttcgccgcagtccggccggcccgagactcgaaccgggggtcctgcgactcaacccttggaaaataaccctccggctacagggagcgagccacttaatgctttcgctttccagcctaaccgcttacgccgcgcgcggccagtggccaaaaaagctagcgcagcagccgccgcgcctggaaggaagccaaaaggagcgctcccccgttgtctgacgtcgcacacctgggttcgacacgcgggcggtaaccgcatggatcacggcggacggccggatccggggttcgaaccccggtcgtccgccatgatacccttgcgaatttatccaccagaccacggaagagtgcccgcttacaggctctccttttgcacggtctagagcgtcaacgactgcgcacgcctcaccggccagagcgtcccgaccatggagcactttttgccgctgcgcaacatctggaaccgcgtccgcgactttccgcgcgcctccaccaccgccgccggcatcacctggatgtccaggtacatctacggattacgtcgacgtttaaaccatatgagcggccgctctagaactagtggatcccccggaagatcagaagttcctattccgaagttcctattctctagaaagtataggaacttctgatctgcgcagccgccatgccggggttttacgagattgtgattaaggtccccagcgaccttgacgagcatctgcccggcatttctgacagctttgtgaactgggtggccgagaaggaatgggagttgccgccagattctgacatggatctgaatctgattgagcaggcacccctgaccgtggccgagaagctgcagcgcgactttctgacggaatggcgccgtgtgagtaaggccccggaggcccttttctttgtgcaatttgagaagggagagagctacttccacatgcacgtgctcgtggaaaccaccggggtgaaatccatggttttgggacgtttcctgagtcagattcgcgaaaaactgattcagagaatttaccgcgggatcgagccgactttgccaaactggttcgcggtcacaaagaccagaaatggcgccggaggcgggaacaaggtggtggatgagtgctacatccccaattacttgctccccaaaacccagcctgagctccagtgggcgtggactaatatggaacagtatttaagcgcctgtttgaatctcacggagcgtaaacggttggtggcgcagcatctgacgcacgtgtcgcagacgcaggagcagaacaaagagaatcagaatcccaattctgatgcgccggtgatcagatcaaaaacttcagccaggtacatggagctggtcgggtggctcgtggacaaggggattacctcggagaagcagtggatccaggaggaccaggcctcatacatctccttcaatgcggcctccaactcgcggtcccaaatcaaggctgccttggacaatgcgggaaagattatgagcctgactaaaaccgcccccgactacctggtgggccagcagcccgtggaggacatttccagcaatcggatttataaaattttggaactaaacgggtacgatccccaatatgcggcttccgtctttctgggatgggccacgaaaaagttcggcaagaggaacaccatctggctgtttgggcctgcaactaccgggaagaccaacatcgcggaggccatagcccacactgtgcccttctacgggtgcgtaaactggaccaatgagaactttcccttcaacgactgtgtcgacaagatggtgatctggtgggaggaggggaagatgaccgccaaggtcgtggagtcggccaaagccattctcggaggaagcaaggtgcgcgtggaccagaaatgcaagtcctcggcccagatagacccgactcccgtgatcgtcacctccaacaccaacatgtgcgccgtgattgacgggaactcaacgaccttcgaacaccagcagccgttgcaagaccggatgttcaaatttgaactcacccgccgtctggatcatgactttgggaaggtcaccaagcaggaagtcaaagactttttccggtgggcaaaggatcacgtggttgaggtggagcatgaattctacgtcaaaaagggtggagccaagaaaagacccgcccccagtgacgcagatataagtgagcccaaacgggtgcgcgagtcagttgcgcagccatcgacgtcagacgcggaagcttcgatcaactacgcagacaggtaccaaaacaaatgttctcgtcacgtgggcatgaatctgatgctgtttccctgcagacaatgcgagagaatgaatcagaattcaaatatctgcttcactcacggacagaaagactgtttagagtgctttcccgtgtcagaatctcaacccgtttctgtcgtcaaaaaggcgtatcagaaactgtgctacattcatcatatcatgggaaaggtgccagacgcttgcactgcctgcgatctggtcaatgtggatttggatgactgcatctttgaacaataaatgatttaaatcaggtatggctgccgatggttatcttccagattggctcgaggacactctctctgaaggaataagacagtggtggaagctcaaacctggcccaccaccaccaaagcccgcagagcggcataaggacgacagcaggggtcttgtgcttcctgggtacaagtacctcggacccttcaacggactcgacaagggagagccggtcaacgaggcagacgccgcggccctcgagcacgacaaagcctacgaccggcagctcgacagcggagacaacccgtacctcaagtacaaccacgccgacgcggagtttcaggagcgccttaaagaagatacgtcttttgggggcaacctcggacgagcagtcttccaggcgaaaaagagggttcttgaacctctgggcctggttgaggaacctgttaagacggctccgggaaaaaagaggccggtagagcactctcctgtggagccagactcctcctcgggaaccggaaaggcgggccagcagcctgcaagaaaaagattgaattttggtcagactggagacgcagactcagtacctgacccccagcctctcggacagccaccagcagccccctctggtctgggaactaatacgatggctacaggcagtggcgcaccaatggcagacaataacgagggcgccgacggagtgggtaattcctcgggaaattggcattgcgattccacatggatgggcgacagagtcatcaccaccagcacccgaacctgggccctgcccacctacaacaaccacctctacaaacaaatttccagccaatcaggagcctcgaacgacaatcactactttggctacagcaccccttgggggtattttgacttcaacagattccactgccacttttcaccacgtgactggcaaagactcatcaacaacaactggggattccgacccaagagactcaacttcaagctctttaacattcaagtcaaagaggtcacgcagaatgacggtacgacgacgattgccaataaccttaccagcacggttcaggtgtttactgactcggagtaccagctcccgtacgtcctcggctcggcgcatcaaggatgcctcccgccgttcccagcagacgtcttcatggtgccacagtatggatacctcaccctgaacaacgggagtcaggcagtaggacgctcttcattttactgcctggagtactttccttctcagatgctgcgtaccggaaacaactttaccttcagctacacttttgaggacgttcctttccacagcagctacgctcacagccagagtctggaccgtctcatgaatcctctcatcgaccagtacctgtattacttgagcagaacaaacactccaagtggaaccaccacgcagtcaaggcttcagttttctcaggccggagcgagtgacattcgggaccagtctaggaactggcttcctggaccctgttaccgccagcagcgagtatcaaagacatctgcggataacaacaacagtgaatactcgtggactggagctaccaagtaccacctcaatggcagagactctctggtgaatccgggcccggccatggcaagccacaaggacgatgaagaaaagttttttcctcagagcggggttctcatctttgggaagcaaggctcagagaaaacaaatgtggacattgaaaaggtcatgattacagacgaagaggaaatcaggacaaccaatcccgtggctacggagcagtatggttctgtatctaccaacctccagagaggcaacagacaagcagctaccgcagatgtcaacacacaaggcgttcttccaggcatggtctggcaggacagagatgtgtaccttcaggggcccatctgggcaaagattccacacacggacggacattttcacccctctcccctcatgggtggattcggacttaaacaccctcctccacagattctcatcaagaacaccccggtacctgcgaatccttcgaccaccttcagtgcggcaaagtttgcttccttcatcacacagtactccacgggacaggtcagcgtggagatcgagtgggagctgcagaaggaaaacagcaaacgctggaatcccgaaattcagtacacttccaactacaacaagtctgttaatgtggactttactgtggacactaatggcgtgtattcagagcctcgccccattggcaccagatacctgactcgtaatctgtaattgcttgttaatcaataaaccgtttaattcgtttcagttgaactttggtctctgcgtatttctttcttatctagtttccatggctactaaatggcccgcctggctgaccgcccaacgacccccgcccattgacgtcaataatgacgtatgttcccatagtaacgccaatagggactttccattgacgtcaatgggtggagtatttacggtaaactgcccacttggcagtacatcaagtgtatcatatgccaagtacgccccctattgacgtcaatgacggtaaatggcccgcctggcattatgcccagtacatgaccttatgggactttcctacttggcagtacatctacgtattagtcatcgctattaccatggtgatgcggttttggcagtacatcaatgggcgtggatagcggtttgactcacggggatttccaagtctccaccccattgacgtcaatgggagtttgttttggcaccaaaatcaacgggactttccaaaatgtcgtaacaactccgccccattgacgcaaatgggcggtaggcgtgtacggtgggaggtctatataagcagagctggtttagtgaaccggatcctgccattgcatccttctctgcagactaagatggagttcctgaaccaagaccgcttgctggccaacctgtgaaactgggctcaaggtgaggggtgctatctgtgattgagggacatggttaatggaattgtctcacacagaaatcgcacccgtcaccttggcctacttatcaccaccccaaacagaggaacacgccttctccagccacagcctatggaagggccttcagctgctgtggccccgaggtaagcttgggggaggctaactgaaacacggaaggagacaataccggaaggaacccgcgctatgacggcaataaaaagacagaataaaacgcacggtgttgggtcgttgtagataagtagcatggcgggttaatcattaactacagcccgggagctttaatgcggtagtttatcacagttaaattgctaacgcagtcaggcaccgtgtatgaaatctaacaatgcgctcatcgtcatcctcggcaccgtcaccctggatgctgtaggcataggcttggttatgccggtactgccgggcctcttgcgggatatcgtccattccgacagcatcgccagtcactatggcgtgctgctagcgctatatgcgttgatgcaatttctatgcgcacccgttctcggagcactgtccgaccgctttggccgccgcccagtcctgctcgcttcgctacttggagccactatcgactacgcgatcatggcgaccacacccgtcctgtggatcctctacgccggacgcatcgtggccggcatcaccggcgccacaggtgcggttgctggcgcctatatcgccgacatcaccgatggggaagatcgggctcgccacttcgggctcatgagcgcttgtttcggcgtgggtatggtggcaggccccgtggccgggggactgttgggcgccatctccttgcatgcaccattccttgcggcggcggtgctcaacggcctcaacctactactgggctgcttcctaatgcaggagtcgcataagggagagcgtcgaccgatgcccttgagagccttcaacccagtcagctccttccggtgggcgcggggcatgactatcgtcgccgcacttatgactgtcttctttatcatgcaactcgtaggacaggtgccggcagcgctctgggtcattttcggcgaggaccgctttcgctggagcgcgacgatgatcggcctgtcgcttgcggtattcggaatcttgcacgccctcgctcaagccttcgtcactggtcccgccaccaaacgtttcggcgagaagcaggccattatcgccggcatggcggccgacgcgctgggctacgtcttgctggcgttcgcgacgcgaggctggatggccttccccattatgattcttctcgcttccggcggcatcgggatgcccgcgttgcaggccatgctgtccaggcaggtagatgacgaccatcagggacagcttcaaggatcgctcgcggctcttaccagcctaacttcgatcattggaccgctgatcgtcacggcgatttatgccgcctcggcgagcacatggaacgggttggcatggattgtaggcgccgccctataccttgtctgcctccccgcgttgcgtcgcggtgcatggagccgggccacctcgacctgaatggaagccggcggcacctcgctaacggattcaccactccaagaattggagccaatcaattcttgcggagaactgtgaatgcgcaaaccaacccttggcagaacatatccatcgcgtccgccatctccagcagccgcacgcggcgcatctcgggcagcgttgggtcctggccacgggtgcgcatgatcgtgctcctgtcgttgaggacccggctaggctggcggggttgccttactggttagcagaatgaatcaccgatacgcgagcgaacgtgaagcgactgctgctgcaaaacgtctgcgacctgagcaacaacatgaatggtcttcggtttccgtgtttcgtaaagtctggaaacgcggaagtcagcgccctgcaccattatgttccggatctgcatcgcaggatgctgctggctaccctgtggaacacctacatctgtattaacgaagcgctggcattgaccctgagtgatttttctctggtcccgccgcatccataccgccagttgtttaccctcacaacgttccagtaaccgggcatgttcatcatcagtaacccgtatcgtgagcatcctctctcgtttcatcggtatcattacccccatgaacagaaatcccccttacacggaggcatcagtgaccaaacaggaaaaaaccgcccttaacatggcccgctttatcagaagccagacattaacgcttctggagaaactcaacgagctggacgcggatgaacaggcagacatctgtgaatcgcttcacgaccacgctgatgagctttaccgcagagcttctttcaattgactttctttaattcgttttccatcttttgttttgttcaaagtttcttctcggtattcttcattttgatcaataacaacgcctgaaaaagctaccagcacatctatatcatcgtagcctttttccttaatatacttcttaaactcatggaaataacggactgcatgtaaacgagaagctgtgacaaccattgcttttgctttaccgccaattttatgtctagttacattccgaaattgttcgaccatgatagccgtcttttgttgtagagtatatggatgtaatgattgataacgcttgatagcttttactccctgtgttgtcgataattccggattctctgatgtgtttttggcaatacgataatatgttttgtaggtcatataattttgtaatacatctaatataaatccttcttcgatagcttgacgcatactgtaaatatgaaaaggtttaaacgttccatctggttgttttgtcccaaacatttctaatgtcttttctttaggagtagctgtaaaagcaaagaaacttaaatttttatgtctgccatgtgtcagaagttcctgaacgatttcatcttcaaaatctaactgctcagcttcgatttctgcttccagttctgcatattcccgtaacgcttcctctgtatctgctaatgctgcttttaattttttcgcactttttcctgtctgggaggaatgtgcttcatctacaataacggcaaagcgacttcccttgttaacttctacttcttcataaataacaggaaacttttgaagtgtcgtgataataattcgttttccgttattaatagcatctcttaaatctttggaagtctttttgtcatcaatggtttctacaagccctgttgtatgatcgaaactggaaattgtttgttgtaattgccgatcaagtactgttcgatctgttaccacgataactgatgtaaaaatgctttcattatcttcattgtgcaaacttgctaaatgatatgccaaccatgctatgctgttcgactttccagaacctgcgctgtgttggataagataattttccccgcttcctttttgacgaacatcttcaacaagttttctgaccacatctaactgatgatagcgtgggaaaatcagcttagaacttgttttgacgctttcctttccgtttttgataaacttttctttttttacttctaaatgcatgaatcctgtaaaggatacggattttatgaccgatgatgaagaaaagaatttgaaacgtttgtctgatttggaggaaggtttacaccgtaaaaggttaatctcctatggtggtttgttaaaagaaatacataaaaaattaaaccttgatgacacagaagaaggcgatttgattcatacagatgatgacgaaaaagccgatgaagatggattttctattattgcaatgtggaattgggaacggaaaaattattttattaaagagtagttcaacaaacgggccatattgttgtataagtgatgaaatactgaatttaaaacttagtttatatgtggtaaaatgttttaatcaagtttaggaggaattaattatgaagtgtaatgaatgtaacagggttcaattaaaagagggaagcgtatcattaaccctataaactacgtctgccctcattattggagggtgaaatgtgaatacatcctattcacaatcgaatttacgacacaaccaaattttaatttggctttgcattttatctttttttagcgtattaaatgaaatggttttgaacgtctcattacctgatattgcaaatgattttaataaaccaccagcgagtacaaactgggtgaacacagcctttatgttaaccttttccattggaacagctgtatatggaaagctatctgatcaattaggcatcaaaaggttactcctatttggaattataataaattgtttcgggtcggtaattgggtttgttggccattctttcttttccttacttattatggctcgttttattcaaggggctggtgcagctgcatttccagcactcgtaatggttgtagttgcgcgctatattccaaaggaaaataggggtaaagcatttggtcttattggatcgatagtagccatgggagaaggagtcggtccagcgattggtggaatgatagcccattatattcattggtcctatcttctactcattcctatgataacaattatcactgttccgtttcttatgaaattattaaagaaagaagtaaggataaaaggtcattttgatatcaaaggaattatactaatgtctgtaggcattgtattttttatgttgtttacaacatcatatagcatttcttttcttatcgttagcgtgctgtcattcctgatatttgtaaaacatatcaggaaagtaacagatccttttgttgatcccggattagggaaaaatataccttttatgattggagttctttgtgggggaattatatttggaacagtagcagggtttgtctctatggttccttatatgatgaaagatgttcaccagctaagtactgccgaaatcggaagtgtaattattttccctggaacaatgagtgtcattattttcggctacattggtgggatacttgttgatagaagaggtcctttatacgtgttaaacatcggagttacatttctttctgttagctttttaactgcttcctttcttttagaaacaacatcatggttcatgacaattataatcgtatttgttttaggtgggctttcgttcaccaaaacagttatatcaacaattgtttcaagtagcttgaaacagcaggaagctggtgctggaatgagtttgcttaactttaccagctttttatcagagggaacaggtattgcaattgtaggtggtttattatccatacccttacttgatcaaaggttgttacctatggaagttgatcagtcaacttatctgtatagtaatttgttattacttttttcaggaatcattgtcattagttggctggttaccttgaatgtatataaacattctcaaagggatttctaaatcgttaagggatcaactttgggagagagttcaaaattgatcctttttttataacaggaattctatggtaaaagcattcctgaacccaatatccttatttttagtggacaaggccttgttctcatatggttgcttgagccagtgccttacaaggctcttccgctttggcaggctgttcaaaattatttattagagcaactcaaggaactaggcggagatccaaaagcaaccgatgcagcacgtgtttttcggattgctgggagcgtcaatagtaagaatggagcggaagtaagagcggaatatcggcacgattacagatatgagttaaggcagattcaatttgattaccttccagaactcaatgaggttattaatcccgctccacaaaagaaaaaacgggggcgtaaaaagaaagtagttcagttattcaatacctacaaactccattacgctcgcctattggatatagtgaaattggtggaactacgaaattatgaggtaactggatacagggaaatcatttgctttttataccgttattggttgtgctgttacacgaacgaccctgtagaggctttaaatcaaacacagacacttaatttacagttcactgagcctttacccttaaaagaggttgaaagggctacacggagcgcagaaaaggcgtgggaagcacgaaataacgaagaggctaaccggattgcaatcgaaaaaggatatcccagtgctggatacaatattagcaataaaaagttgattgaatggctagatatcacaccagaagaacagaagcatttacagacgattatagacgctaatgagaaacggagaagaaagcgggaaagggataggatttatcaagaacaaaaacgtcgtgagcggggagatatgacccgacaggagtatattaagcaacaacaggataaaacagatgataaattatttaaattgcaggagttattagaacagaatcccaaaatctcaaaaattaaattagcaaaaatacttggtgtagataaatcgcacttatacagactgctgaaacaactataactggaaaaaattagtgtctcatggttcgtcgcccttatattatgggcgttagcctgcttgctaattggataggtgttattgtcatttcaacgtcggacgttttggtagatgaacgtcggacgttatttgcttcaatagattgttgatgtattaagggttgcagtgaatcgacaagcaaaaagttatgacgttgtgaaaaaattgaatagaaaattggaaattacgtcggacgttctaacttaaaaaccctgttatatcaatgatttaaaaggaaattaacgtcataaaagacctttctgcaacaaaagtttttctggaagagttgaggttattttataggtattatggacttttgtagactttttgtgtactttttgtggactccacactcgctggtatcgtgttattttttaattgagatatgaatatggaaattaaacgttttaggcgttggtttggtgatgacaaaaaaataagagtacccgctcacaacggatactctttcgagaaatgtacgaaacgctataaataaaaaataactagatacatttacattgtatcacgtttcgtacatttctccaataacaaattgattggaggaatgcaaagtgaataatgaaccagtaaaacgtggtaagaagaacagatgggaattaaacctacctataatgacttatgtagtagctgatgattggattgataaactaggacacgaaacgtttactttatggttgaggttccatacttgggtagatagagaagatgaactccgagattatgatcgcatacctagaagttttgagaacatatataaaaagacactaggaatctcaaaaagtaagttttatagattgataaaacctttatgggaatatggattaatagacatcatagaatacgaagaatctaaccgtaattctactaaacctaaaaatataattgtttatgagtatcctttacacgaaatagaaagaaagtataaaccactagaaaaattaagagattgggataaagactataattccgtttctaaagaattaggtaaaacaggtggtagaccaaggaaaaaagatagtgaagaagaacccgaaaagaaacccgaagaagtaactaaaaagaaacgtaaatataagttaaaaagagttatccacaacggtttcaaaaatgaaacggtggagggtttcaaaaatgaaacggtggagggtttcaaaaatgaaacggtgaccgtttcaaaaataaaacccaataattattcaaatatctttaataacttatcaaatatttctactaatgtttcaaataatttattaattgatgatgatgaggaaatcgaaaatgaaccaactggtcgtacaataaataggtcattacttttttcacaagaagatattaaacaggcctatcaatttattaatagattttcagttatacagttacgtgaaaactttagctttgataaacactttgaagaacggttggtatgttatttatggaaagcagggatttctactttttacacgcacgaaatcagtaaaatgataaaaaaaatagcagactatgaaaaatctaaaaaaggtagattaaacccaatacgtgaccgagccttatatatggtaaatggtcttgtaatgaatagagcttcttcccaaagtgaacatgctacttataaactaaaccaatataaaaaacagaaggaacaggaaaaacaacaacaggagcaacaaagatcaagagtaccgttctataattggttggaggaaagagaagaacaaaccgaaggtcaactacccaccacttaaagcctaacggcttttgaagtggggcttgtaaaaagccctagttgactaccccaagtctttcgaggactacgttggaaaggtcatgacacctacaaatgctcctctagttcgtagccactgtcgttgatggttaaaagtcctgatgggtagggacggtgctgtcaacatcacaagcccttccaacatgggggaagaggaagaacactccgagaaaggagggggctgtcgtacacgccttgttcgtgtacgtgatttttaacacttttatctctaatataatctctccttgagttagcagagactaagaataaaacacattaggattttttatctacataaggaggttcaatacatgcctactatttcgtttaagggaaagtcttttgtacaaaatcatcacttgactgtaaaatatcatgaattgatcccagaaccagaaaaaagtctgaccgataaagttagtcttcatgacaatcttatcattcatggggacaatttaaaggcgttgaaagctctactacctacatatgctggtaagatagattgcatctatattgacccaccatacaatactggaactgaaaaatggatttataatgataatgtcaactccccaatgattagggaatggcttggaaaagtggtagacaaagaagacttatcccgacatgataagtggctttgtatgatgatgccgaggttaaaactgttgaaagagttgttgtcagaagacggagtgatatttgtaagcattgactacaatgaaatacaccatcttacgtgccttatgaacgaaatattcggtgaggagaattttcgtgacgctattatcattcgtagaggagtaaaaaatgttcaagcgcaatttgacacaattgattctctttcaaatggttatgagtctattttggtttacactaaacagccatctcgacgatttaataaggtttatgaagatgtagaagaaaagcctggtagttggaataatcattggagaggtacagaccgtaaaactatgagatatgaattatttggggttactccgacagaaggtcaatggagatgggggaaagaacgtagtctccaggctattgaaaactatcaaatgatgttagatgaacttagacaaaaaggcattactaatccaactcaagaggatattgataaatggtatcttgaatatgtagaaaataatggggaagatattgacttgttacgacaaaatgataatggcacgattgagcactttgttccaccgactagcaaaaagttgttaagtaatgcctggtttgacttaaaacccaacggttctagtcaattaaagaagatatttggaaggaaggttttcgataaccctaaatcaattgatttggtaaaaagactaatacaatttgcgactgaaaacaaagaagcgattgtacttgactcatttgcagggagtggcactactgctcatgcagtattatcgcttaacaaacaagatggagggaatcgtcgtttcatccttattgagatggaagaatatgcacatgagattaccgcagaacgcgtaagaagggttatcaaagggattccaaaagcaaaggatgaagaattaaaacagggattgaagggcactttttctttcttccgtttaggagatccaattgagatggaggcaattttgaaaggtgaaaatcttccttcctatgaagatttagcacgttatcttttctttactgcaacaggtgaattgtttgatccatcagtggtagattatgaacatcattttatcggatcaagtagggattatgatgtgttcttgttttacaagcctgacttagaatatcttaaaacaaccgcacttacgcttgaaaaagcagaagaaattacgagaattactataggtagtagtaagaaacgccttgtatttgcaccgatgcagttcttggaccaagactatttggacaagtaccgtattgattttgttcaacttccttacgaaatttatcgcatgaaaggctgatggaacgatggaactaaaacaataccaacagcaaacattggccaagattcaagcatatcttcaagcattagcgaaattcaaagaaaagcgagataaacttcttgctattgatgctgatttagccaaaactatcaatccaccgaaagcagcgtgggatgaagtagttggcgaggggatcacctaccacataaaaaagaatggcataaatgaagatttgccaaactttaatatcaaagtaccaactggtggggggaaaaccctcctagcggtgcacactatagacttaatcaatactcattacctcaagaaaaaaacgggatttgtactttggattgtgccgtcgaatcaaatataccgtcaaaccttgtctgctttacgaaatcgtgagcatccataccggcaagtattggatttatcaagtggcggtcggacggaaatcctcgaaaaaatggatcggtttacaccccaagacgtacaagagaaattacttgtgatgttgctcatgttgccatcagccaatcgtcaaacgaaagaaacattgaaaatcttccgtgatgcgggtggatacgaatcattttttcctaaggaagaccattatctagagcatgaagcactacttgaaaaatatccaaatttggattacttcggtggggaagaccttgggctatttggatatcagccaaagcaagtcaagacgtcacttgggaacgttcttcgtattctgcagcctattgtcattgtcgatgaaggacaaaaggcatattcagcaggggcacaggaaacgatccgagggtttaatcctagcatcgtggtagaattatcagcaactccggcgaaaggggctaatagtctcgtagaaataaaaggtcgtgatctagaccgtgaagagatgattaaactcgatctgcacgttacgaataaatcaagcggggattggagggacacgttaaacgcaagtgttgaaaaacgtgaggagttagagcggattgcgctcgattatgaagcccaaagcggacgattaattcgtcccatttgtcttattcaagtagaacggacggggaaggatcaacgtggtaaaggatacattcactccgaagacgtgagagaatatctcatcaaagagtgtggtatccctccagagcatatagcggtcaaatcttctgaaaaggatgacattgaggggattgatttatactctaaggaatgcccgattcgttatatcatcacaaaacaagcattacaggaagggtgggactgttcatttgcttacgtcctcacgattttaacgaatccgtcgtcgaagaacggtattacacaattagttggacggattctgcgtcagccgtgggcccgtaaaacaaagataaaagccttagacgaatcgtacgtgttctgcttccagcaaaacgcaaataaccttctcaaagacattaaaaagggacttgaaggtgaaggacttggagacttgacttcaaggattgtcggtggtgaaccagatgatgaaggtaaatcgggcaatgaacgtgaaattaatgtcaaaattcggaataagttcaagtgtttcgagggaaagatttaccttccattattcctctttcaagaagccgaacatggttggcgagaagttagttatgagatggatattttaagtcgcattgattggtcgcaagtgtctttggacggcttagaacacttggtcttgtcctcgcaacaaaaggaagacatcgaaataagtttaggactaagcgataatacagaagaatttcttgagacacatagaaaaacaacagtaaaaagttcggttaatattgatttagtgatgatcactcgtcatattggtaatcttattccgaatccatggattgcccatgaattagcggaaaagacgattgagattctcaaggtacgttattcggaagatgaaatcgcagctaaccaagcatttatcattgaggaattgaaaaagtggttagatcgtgagcgtgaccgcctagctgaacaggtatttaaacagttgattgatgaagggaaaattcaattccttctggaagagaaacaaggacggattcctaaaacagttcgcaaagtcaaacaaaaagcaaagaagttacgtcatgacaacgatgaaccggttgaaaaaagccttgtagaaccagttcttgatgaggaattgatcttcatggctggtcattaataaataaactgagataaacataagaataaaaggatagtttcattcacgtctcaattccttatatacttctttcgctacagcctccattactgcattataaaaggatcgatcctcaaacaatttagaataagcgttcatttgttccatatacagttcttgggcgactttttcaaacacgtcaggaaagatacttttattaaacatttcttcatcattgtttctggcaaatctccttaatttttcgttgcctttaacagtttttttgtaaattccttctacgatgacccgatcagcttctgtaaatttgccttcaaatcttttgtttactcgttgaataatattttctaataagtcttgatcatctggaggttttatgcctgtatcaacattatctgaatttttgagtacattttctgggctgtttgattctaatgtgatggtccctttaaatgtttcttctaacttgtaatactctaatttaactttgtcttcgatattgattttttctgcactatttttcggaataaacttaattaaatacgatgtgaaaatgtactcttcatgcaactctttgtcaaacattctgacgagttgtgttatatatgaataccatttattaaagttacgaaccgtaacccgaaatttatattgtgtttcttcatcaagttcttcatagcgtttaataattggaattaagtggctggctatttttcctaagtccttttctgtttgtttcccttttttaaaataaattctcgttagtttctttatgtcttgatcattgtaaattttaaagtttctcagctttgttctcgtatcatatatgagatttacatcaatctctttatccagttcggttacttcataataaggctggaaagctctgcctcgcgcgtttcggtgatgacggtgaaaacctctgacacatgcagctcccggagacggtcacagcttgtctgtaagcggatgccgggagcagacaagcccgtcagggcgcgtcagcgggtgttggcgggtgtcggggcgcagccatgacccagtcacgtagcgatagcggagtgtatactggcttaactatgcggcatcagagcagattgtactgagagtgcaccatatgcggtgtgaaataccgcacagatgcgtaaggagaaaataccgcatcaggcgctcttccgcttcctcgctcactgactcgctgcgctcggtcgttcggctgcggcgagcggtatcagctcactcaaaggcggtaatacggttatccacagaatcaggggataacgcaggaaagaacatgtgagcaaaaggccagcaaaaggccaggaaccgtaaaaaggccgcgttgctggcgtttttccataggctccgcccccctgacgagcatcacaaaaatcgacgctcaagtcagaggtggcgaaacccgacaggactataaagataccaggcgtttccccctggaagctccctcgtgcgctctcctgttccgaccctgccgcttaccggatacctgtccgcctttctcccttcgggaagcgtggcgctttctcatagctcacgctgtaggtatctcagttcggtgtaggtcgttcgctccaagctgggctgtgtgcacgaaccccccgttcagcccgaccgctgcgccttatccggtaactatcgtcttgagtccaacccggtaagacacgacttatcgccactggcagcagccactggtaacaggattagcagagcgaggtatgtaggcggtgctacagagttcttgaagtggtggcctaactacggctacactagaaggacagtatttggtatctgcgctctgctgaagccagttaccttcggaaaaagagttggtagctcttgatccggcaaacaaaccaccgctggtagcggtggtttttttgtttgcaagcagcagattacgcgcagaaaaaaaggatctcaagaagatcctttgatcttttctacggggtctgacgctcagtggaacgaaaactcacgttaagggattttggtcatgagattatcaaaaaggatcttcacctagatccttttaaattaaaaatgaagttttaaatcaatctaaagtatatatgagtaaacttggtctgacagttaccaatgcttaatcagtgaggcacctatctcagcgatctgtctatttcgttcatccatagttgcctgactccccgtcgtgtagataactacgatacgggagggcttaccatctggccccagtgctgcaatgataccgcgagacccacgctcaccggctccagatttatcagcaataaaccagccagccggaagggccgagcgcagaagtggtcctgcaactttatccgcctccatccagtctattaattgttgccgggaagctagagtaagtagttcgccagttaatagtttgcgcaacgttgttgccattgctgcaggcatcgtggtgtcacgctcgtcgtttggtatggcttcattcagctccggttcccaacgatcaaggcgagttacatgatcccccatgttgtgcaaaaaagcggttagctccttcggtcctccgatcgttgtcagaagtaagttggccgcagtgttatcactcatggttatggcagcactgcataattctcttactgtcatgccatccgtaagatgcttttctgtgactggtgagtactcaaccaagtcattctgagaatagtgtatgcggcgaccgagttgctcttgcccggcgtcaacacgggataataccgcgccacatagcagaactttaaaagtgctcatcattggaaaacgttcttcggggcgaaaactctcaaggatcttaccgctgttgagatccagttcgatgtaacccactcgtgcacccaactgatcttcagcatcttttactttcaccagcgtttctgggtgagcaaaaacaggaaggcaaaatgccgcaaaaaagggaataagggcgacacggaaatgttgaatactcatactcttcctttttcaatattattgaagcatttatcagggttattgtctcatgagcggatacatatttgaatgtatttagaaaaataaacaaataggggttccgcgcacatttccccgaaaagtgccacctgacgtctaagaaaccattattatcatgacattaacctataaaaataggcgtatcacgaggccctttcgtcttcaagaa

SEQ ID NO: 171 - DNA, 54 bp, synthetic construct
  misc_feature 1..54: note = 1st-SfiI-BspQI-F
  source 1..54: mol_type = other DNA
aattcggcctgtttggccagaagagcaaaaaaaagctcttcaccttgatggcca

SEQ ID NO: 172 - DNA, 54 bp, synthetic construct
  misc_feature 1..54: note = 2nd-SfiI-BspQI-F
  source 1..54: mol_type = other DNA
aattcggccttgatggccagaagagcaaaaaaaagctcttcacctacttggcca

SEQ ID NO: 173 - DNA, 54 bp, synthetic construct
  misc_feature 1..54: note = 3rd-SfiI-BspQI-F
  source 1..54: mol_type = other DNA
aattcggcctacttggccagaagagcaaaaaaaagctcttcaccttgttggcca

SEQ ID NO: 174 - DNA, 54 bp, synthetic construct
  misc_feature 1..54: note = 4th-SfiI-BspQI-F
  source 1..54: mol_type = other DNA
aattcggccttgttggccagaagagcaaaaaaaagctcttcacctgattggcca

SEQ ID NO: 175 - DNA, 54 bp, synthetic construct
  misc_feature 1..54: note = 5th-SfiI-BspQI-F
  source 1..54: mol_type = other DNA
aattcggcctgattggccagaagagcaaaaaaaagctcttcaccttcttggcca

SEQ ID NO: 176 - DNA, 54 bp, synthetic construct
  misc_feature 1..54: note = 1st-SfiI-BspQI-R
  source 1..54: mol_type = other DNA
agcttggccatcaaggtgaagagcttttttttgctcttctggccaaacaggccg

SEQ ID NO: 177 - DNA, 54 bp, synthetic construct
  misc_feature 1..54: note = 2nd-SfiI-BspQI-R
  source 1..54: mol_type = other DNA
agcttggccaagtaggtgaagagcttttttttgctcttctggccatcaaggccg

SEQ ID NO: 178 - DNA, 54 bp, synthetic construct
  misc_feature 1..54: note = 3rd-SfiI-BspQI-R
  source 1..54: mol_type = other DNA
agcttggccaacaaggtgaagagcttttttttgctcttctggccaagtaggccg

SEQ ID NO: 179 - DNA, 54 bp, synthetic construct
  misc_feature 1..54: note = 4th-SfiI-BspQI-R
  source 1..54: mol_type = other DNA
agcttggccaatcaggtgaagagcttttttttgctcttctggccaacaaggccg

SEQ ID NO: 180 - DNA, 54 bp, synthetic construct
  misc_feature 1..54: note = 5th-SfiI-BspQI-R
  source 1..54: mol_type = other DNA
agcttggccaagaaggtgaagagcttttttttgctcttctggccaatcaggccg

SEQ ID NO: 181 - DNA, 29 bp, synthetic construct
  misc_feature 1..29: note = P-E2A-F
  source 1..29: mol_type = other DNA
taggctcttcagccccgggtgtggccgct

SEQ ID NO: 182 - DNA, 39 bp, synthetic construct
  misc_feature 1..39: note = P-E2A-R
  source 1..39: mol_type = other DNA
taggctcttctcatccgcagctgcctgtatcacaaaagc

SEQ ID NO: 183 - DNA, 42 bp, synthetic construct
  misc_feature 1..42: note = P-E4-F
  source 1..42: mol_type = other DNA
taggctcttcagccgttttagggcggagtaacttgtatgtgt

SEQ ID NO: 184 - DNA, 45 bp, synthetic construct
  misc_feature 1..45: note = P-E4-R
  source 1..45: mol_type = other DNA
taggctcttctcataacagtcagccttaccagtaaaaaagaaaac

SEQ ID NO: 185 - DNA, 38 bp, synthetic construct
  misc_feature 1..38: note = P-E1A-F
  source 1..38: mol_type = other DNA
taggctcttcagcctagtgtggcggaagtgtgatgttg

SEQ ID NO: 186 - DNA, 36 bp, synthetic construct
  misc_feature 1..36: note = P-E1A-R
  source 1..36: mol_type = other DNA
taggctcttctcattttcagtcccggtgtcggagcg

SEQ ID NO: 187 - DNA, 42 bp, synthetic construct
  misc_feature 1..42: note = P-E1B-F
  source 1..42: mol_type = other DNA
taggctcttcagccgggtgagataatgtttaacttgcatggc

SEQ ID NO: 188 - DNA, 43 bp, synthetic construct
  misc_feature 1..43: note = P-E1B-R
  source 1..43: mol_type = other DNA
taggctcttctcatgaggtcagatgtaaccaagattagcccac

SEQ ID NO: 189 - DNA, 29 bp, synthetic construct
  misc_feature 1..29: note = P-UBC-F
  source 1..29: mol_type = other DNA
taggctcttcagccggtgcagcggcctcc

SEQ ID NO: 190 - DNA, 45 bp, synthetic construct
  misc_feature 1..45: note = P-UBC-R
  source 1..45: mol_type = other DNA
taggctcttctcatggtggctttactagtctaacactgaaaatta

SEQ ID NO: 191 - DNA, 33 bp, synthetic construct
  misc_feature 1..33: note = P-mPGK-F
  source 1..33: mol_type = other DNA
taggctcttcagccttctaccgggtaggggagg

SEQ ID NO: 192 - DNA, 45 bp, synthetic construct
  misc_feature 1..45: note = P-mPGK-R
  source 1..45: mol_type = other DNA
taggctcttctcatggtggcaggtcgaaaggcccggagatgagga

SEQ ID NO: 193 - DNA, 29 bp, synthetic construct
  misc_feature 1..29: note = P-EF1A-F
  source 1..29: mol_type = other DNA
taggctcttcagccggctccggtgcccgt

SEQ ID NO: 194 - DNA, 45 bp, synthetic construct
  misc_feature 1..45: note = P-EF1A-R
  source 1..45: mol_type = other DNA
taggctcttctcatggtggctcacgacacctgaaatggaagaaaa

SEQ ID NO: 195 - DNA, 33 bp, synthetic construct
  misc_feature 1..33: note = VA-F
  source 1..33: mol_type = other DNA
taggctcttcagccacgcggtaggaggagggga

SEQ ID NO: 196 - DNA, 32 bp, synthetic construct
  misc_feature 1..32: note = VA-R
  source 1..32: mol_type = other DNA
taggctcttctaggccaacgccagcaacgcgg

SEQ ID NO: 197 - DNA, 34 bp, synthetic construct
  misc_feature 1..34: note = E2A-F
  source 1..34: mol_type = other DNA
taggctcttcaatggccagtcgggaagaggagca

SEQ ID NO: 198 - DNA, 40 bp, synthetic construct
  misc_feature 1..40: note = E2A-R
  source 1..40: mol_type = other DNA
taggctcttctttaaaaatcaaaggggttctgccgcgcat

SEQ ID NO: 199 - DNA, 36 bp, synthetic construct
  misc_feature 1..36: note = E4-F
  source 1..36: mol_type = other DNA
taggctcttcaatgactacgtccggcgttccatttg

SEQ ID NO: 200 - DNA, 41 bp, synthetic construct
  misc_feature 1..41: note = E4-R
  source 1..41: mol_type = other DNA
taggctcttctttacatgggggtagagtcataatcgtgcat

SEQ ID NO: 201 - DNA, 38 bp, synthetic construct
  misc_feature 1..38: note = E1A-F
  source 1..38: mol_type = other DNA
taggctcttcaatgagacatattatctgccacggaggt

SEQ ID NO: 202 - DNA, 36 bp, synthetic construct
  misc_feature 1..36: note = E1A-R
  source 1..36: mol_type = other DNA
taggctcttctttatggcctggggcgtttacagctc

SEQ ID NO: 203 - DNA, 45 bp, synthetic construct
  misc_feature 1..45: note = E1B-F
  source 1..45: mol_type = other DNA
taggctcttcaatggaggcttgggagtgtttggaagatttttctg

SEQ ID NO: 204 - DNA, 43 bp, synthetic construct
  misc_feature 1..43: note = E1B-R
  source 1..43: mol_type = other DNA
taggctcttctttaatctgtatcttcatcgctagagccaaact

SEQ ID NO: 205 - DNA, 35 bp, synthetic construct
  misc_feature 1..35: note = SV40-F
  source 1..35: mol_type = other DNA
taggctcttcataagatggccggccgcttcgagca

SEQ ID NO: 206 - DNA, 32 bp, synthetic construct; identical to SEQ ID NO: 196
  misc_feature 1..32: note = SV40-R
  source 1..32: mol_type = other DNA

SEQ ID NO: 207 - DNA, 42 bp, synthetic construct
  misc_feature 1..42: note = bGH-F
  source 1..42: mol_type = other DNA
taggctcttcataagaattcctagagctcgctgatcagcctc

SEQ ID NO: 208 - DNA, 33 bp, synthetic construct
  misc_feature 1..33: note = bGH-R
  source 1..33: mol_type = other DNA
taggctcttctaggcctccccagcatgcctgct

SEQ ID NO: 209 - DNA, 43 bp, synthetic construct
  misc_feature 1..43: note = hGH-F
  source 1..43: mol_type = other DNA
taggctcttcataatctctagagtcgacactagtgcggatcca

SEQ ID NO: 210 - DNA, 41 bp, synthetic construct
  misc_feature 1..41: note = hGH-R
  source 1..41: mol_type = other DNA
taggctcttctaggccagatctatcgataaggacagggaag

SEQ ID NO: 211 - DNA, 45 bp, synthetic construct
  misc_feature 1..45: note = HSV-F
  source 1..45: mol_type = other DNA
taggctcttcataaaataaaaagacagaataaacctattggttaa

SEQ ID NO: 212 - DNA, 45 bp, synthetic construct
  misc_feature 1..45: note = HSV-R
  source 1..45: mol_type = other DNA
taggctcttctaggccgttaaatcagctcattttttaaccaatag

SEQ ID NO: 213 - DNA, 20 bp, synthetic construct
  misc_feature 1..20: note = CMV primer 1
  source 1..20: mol_type = other DNA
catcaatgggcgtggatagc

SEQ ID NO: 214 - DNA, 24 bp, synthetic construct
  misc_feature 1..24: note = CMV primer 2
  source 1..24: mol_type = other DNA
ggagttgttacgacattttggaaa

SEQ ID NO: 215 - DNA, 41 bp, synthetic construct
  misc_feature 1..41: note = P-Cap1-F
  source 1..41: mol_type = other DNA
taggctcttcagccaggtgacaaagcaggaagtcaaagagt

SEQ ID NO: 216 - DNA, 45 bp, synthetic construct
  misc_feature 1..45: note = P-Cap1-R
  source 1..45: mol_type = other DNA
taggctcttctcatacctggtttaagtcatttattgctcagaaac

SEQ ID NO: 217 - DNA, 32 bp, synthetic construct
  misc_feature 1..32: note = P-Rep2-F
  source 1..32: mol_type = other DNA
taggctcttcagccggaggggtggagtcgtga

SEQ ID NO: 218 - DNA, 35 bp, synthetic construct
  misc_feature 1..35: note = P-Rep2-R
  source 1..35: mol_type = other DNA
taggctcttctcatggcggctgcgcgttcaaacct

SEQ ID NO: 219 - DNA, 39 bp, synthetic construct
  misc_feature 1..39: note = Cap1-F
  source 1..39: mol_type = other DNA
taggctcttcaatggctgccgatggttatcttccagatt

SEQ ID NO: 220 - DNA, 34 bp, synthetic construct
  misc_feature 1..34: note = Cap1-R
  source 1..34: mol_type = other DNA
taggctcttctttacaggggacgggtaaggtaac

SEQ ID NO: 221 - DNA, 41 bp, synthetic construct
  misc_feature 1..41: note = Rep2-F
  source 1..41: mol_type = other DNA
taggctcttcaatgccggggttttacgagattgtgattaag

SEQ ID NO: 222 - DNA, 36 bp, synthetic construct
  misc_feature 1..36: note = Rep2-R
  source 1..36: mol_type = other DNA
taggctcttctttagagaggttgtcctcgagccaat

SEQ ID NO: 223 - DNA, 52 bp, synthetic construct
  misc_feature 1..52: note = VA primer 1
  source 1..52: mol_type = other DNA
ttagtaagcttccctcctgacgcggtaggaggaggggagggtgccctgcatg

SEQ ID NO: 224 - DNA, 56 bp, synthetic construct
  misc_feature 1..56: note = VA primer 2
  source 1..56: mol_type = other DNA
ccttttgctcacatgtcaattggtagatgtacctggacatccaggtgatgccggcg

SEQ ID NO: 225 - DNA, 60 bp, synthetic construct
  misc_feature 1..60: note = E4 primer 1
  source 1..60: mol_type = other DNA
tgtacaggcgcgccgaattcgttttagggcggagtaacttgtatgtgttgggaattgtag

SEQ ID NO: 226 - DNA, 51 bp, synthetic construct
  misc_feature 1..51: note = E4 primer 2
  source 1..51: mol_type = other DNA
agggaagcttactaaacggtacacaggaaacaggagacacaactccaagtg

SEQ ID NO: 227 - DNA, 76 bp, synthetic construct
  misc_feature 1..76: note = E2A primer 1
  source 1..76: mol_type = other DNA
gaaaagtgccacctgacgtcgcggccgcgcgatcgcggtacccaactccatgctcaacagtccccaggtacagccc

SEQ ID NO: 228 - DNA, 60 bp, synthetic construct
  misc_feature 1..60: note = E2A primer 2
  source 1..60: mol_type = other DNA
gaattcggcgcgcctgtacagcccgggcgaccgcaccctgtgacgaaagccgcccgcaag

SEQ ID NO: 229 - DNA, 108 bp, synthetic construct
  misc_feature 1..108: note = p5 primer 1
  source 1..108: mol_type = other DNA
gaaaagtgccacctgacgtcgcggccgcggaggggtggagtcgtgacgtgaattacgtcatagggttagggaggtcctgtattagaggtcacgtgagtgttttgcgac

SEQ ID NO: 230 - DNA, 99 bp, synthetic construct
  misc_feature 1..99: note = p5 primer 2
  source 1..99: mol_type = other DNA
gttcaaacctcccgcttcaaaatggagaccctgcgtgctcactcgggcttaaatacccagcgtgaccacatggtgtcgcaaaatgtcgcaaaacactca

SEQ ID NO: 231 - DNA, 41 bp, synthetic construct
  misc_feature 1..41: note = AAV2 Rep primer 1
  source 1..41: mol_type = other DNA
gcgggaggtttgaacgcgcagccgccatgccggggttttac

SEQ ID NO: 232 - DNA, 38 bp, synthetic construct
  misc_feature 1..38: note = AAV2 Rep primer 2
  source 1..38: mol_type = other DNA
gatcgcagcgctatttaaatcatttattgttcaaagat

SEQ ID NO: 233 - DNA, 32 bp, synthetic construct
  misc_feature 1..32: note = SV40 ori primer 1
  source 1..32: mol_type = other DNA
aatagcgctgcgatcgcggcctccaaaaaagc

SEQ ID NO: 234 - DNA, 37 bp, synthetic construct
  misc_feature 1..37: note = SV40 ori primer 2
  source 1..37: mol_type = other DNA
ccttttgctcacatgtcaattgatcccgcccctaact

SEQ ID NO: 235 - DNA, 23 bp, synthetic construct
  misc_feature 1..23: note = AAV1 Cap primer 1
  source 1..23: mol_type = other DNA
aacaataaatgatttaaatcagg

SEQ ID NO: 236 - DNA, 38 bp, synthetic construct
  misc_feature 1..38: note = AAV1 Cap primer 2
  source 1..38: mol_type = other DNA
ggccgcgatcgcagcgctgtagccatggaaactagata

SEQ ID NO: 237 - DNA, 13990 bp, synthetic construct
  misc_feature 1..13990: note = Seed plasmid #9
  source 1..13990: mol_type = other DNA
ggcctgtttggccacgcggtaggaggaggggagggtgccctgcatgtctgccgctgctcttgctcttgccgctgctgaggaggggggcgcatctgccgcagcaccggatgcatctgggaaaagcaaaaaaggggctcgtccctgtttccggaggaatttgcaagcggggtcttgcatgacggggaggcaaacccccgttcgccgcagtccggccggtccgagactcgaaccgggggtcccgcgactcaacccttggaaaataaccctccggctacagggagcgagccacttaatgctttcgctttccagcctaaccgcttacgctgcgcgcggccagtggccaaaaaagctagcgcagcagccgccgcgcctggaaggaagccaaaaggagcactcccccgttgtctgacgtcgcacacctgggttcgacacgcgggcggtaaccgcatggatcacggcggacggccggatacggggctcgaaccccggtcgtccgccatgatacccttgcgaatttatccaccagaccacggaagagtgcccgcttacaggctctccttttgcacggtctagagcgtcaacgattgcgcgcgcctgaccggccagagcgtcccgaccatggagcactttttgccgctgcgcaacatctggaaccgcgtccgcgactttccgcgcgcctccaccaccgccgccggcatcacctggatgtccaggtacatctaccaattgacatgtgagcaaaaggccagcaaaaggccaggaaccgtaaaaaggccgcgttgctggcgttggccttgatggccccgggtgtggccgctggagatgacgtagttttcgcgcttaaatttgagaaagggcgcgaaactagtccttaagagtcagcgcgcagtatttactgaagagagcctccgcgtcttccagcgtgcgccgaagctgatcttcgcttttgtgatacaggcagctgcggatggccagtcgggaagaggagcagcgcgaaaccacccccgagcgcggacgcggtgcggcgcgacgtcccccaaccatggaggacgtgtcgtccccgtccccgtcgccgccgcctccccgggcgcccccaaaaaagcggatgaggcggcgtatcgagtccgaggacgaggaagactcatcacaagacgcgctggtgccgcgcacacccagcccgcggccatcgacctcggcggcggatttggccattgcgcccaagaagaaaaagaagcgcccttctcccaagcccgagcgcccgccatcaccagaggtaatcgtggacagcgaggaagaaagagaagatgtggcgctacaaatggtgggtttcagcaacccaccggtgctaatcaagcatggcaaaggaggtaagcgcacagtgcggcggctgaatgaagacgacccagtggcgcgtggtatgcggacgcaagaggaagaggaagagcccagcgaagcggaaagtgaaattacggtgatgaacccgctgagtgtgccgatcgtgtctgcgtgggagaagggcatggaggctgcgcgcgcgctgatggacaagtaccacgtggataacgatctaaaggcgaacttcaaactactgcctgaccaagtggaagctctggcggccgtatgcaagacctggctgaacgaggagcaccgcgggttgcagctgaccttcaccagcaacaagacctttgtgacgatgatggggcgattcctgcaggcgtacctgcagtcgtttgcagaggtgacctacaagcatcacgagcccacgggctgcgcgttgtggctgcaccgctgcgctgagatcgaaggcgagcttaagtgtctacacggaagcattatgataaataaggagcacgtgattgaaatggatgtgacgagcgaaaacgggcagcgcgcgctgaaggagcagtctagcaaggccaagatcgtgaagaaccggtggggccgaaatgtggtgcagatctccaacaccgacgcaaggtgctgcgtgcacgacgcggcctgtcctgccaatcagttttccggcaagtcttgcggcatgttcttctctgaaggcgcaaaggctcaggtggcttttaagcagatcaaggcttttatgcaggcgctgtatcctaacgcccagaccgggcacggtcaccttttgatgccactacggtgcgagtgcaactcaaagcctgggcacgcgccctttttgggaaggcagctaccaaagttgactccgttcgccctgagcaacgcggaggacctggacgcggatctgatctccgacaagagcgtgctggccagcgtgcaccacccggcgctgatagtgttccagtgctgcaaccctgtgtatcgcaactcgcgcgcgcagggcggaggccccaactgcgacttcaagatatcggcgcccgacctgctaaacgcgttggtgatggtgcgcagcctgtggagtgaaaacttcaccgagctgccgcggatggttgtgcctgagtttaagtggagcactaaacaccagtatcgcaacgtgtccctgccagtggcgcatagcgatgcgcggcagaacccctttgatttttaagatggccggccgcttcgagcagacatgataagatacattgatgagtttggacaaaccacaactagaatgcagtgaaaaaaatgctttatttgtgaaatttgtgatgctattgctttatttgtaaccattataagctgcaataaacaagttaacaacaacaattgcattcattttatgtttcaggttcagggggaggtgtgggaggttttttaaagcaagtaaaacctctacaaatgtggtagcggccgcggcgctcttccgcttcctcgctcactgactcgctgcgctcggtcgttcggctgcggcgagcggtatcagctcactcaaaggcggtaatacggttatccacagaatcaggggataacgcaggaaagaacatgtgagcaaaaggccagcaaaaggccaggaaccgtaaaaaggccgcgttgctggcgttggcctacttggccgttttagggcggagtaacttgtatgtgttgggaattgtagttttcttaaaatgggaagttacgtaacgtgggaaaacggaagtgacgatttgaggaagttgtgggttttttggctttcgtttctgggcgtaggttcgcgtgcggttttctgggtgttttttgtggactttaaccgttacgtcattttttagtcctatatatactcgctctgcacttggcccttttttacactgtgactgattgagctggtgccgtgtcgagtggtgtttttttaataggttttcttttttactggtaaggctgactgttatgactacgtccggcgttccatttggcatgacactacgaccaacacgatctcggttgtctcggcgcactccgtacagtagggatcgtctacctccttttgagacagaaacccgcgctaccatactggaggatcatccgctgctgcccgaatgtaacactttgacaatgcacaacgtgagttacgtgcgaggtcttccctgcagtgtgggatttacgctgattcaggaatgggttgttccctgggatatggttctaacgcgggaggagcttgtaatcctgaggaagtgtatgcacgtgtgcctgtgttgtgccaacattgatatcatgacgagcatgatgatccatggttacgagtcctgggctctccactgtcattgttccagtcccggttccctgcagtgtatagccggcgggcaggttttggccagctggtttaggatggtggtggatggcgccatgtttaatcagaggtttatatggtaccgggaggtggtgaattacaacatgccaaaagaggtaatgtttatgtccagcgtgtttatgaggggtcgccacttaatctacctgcgcttgtggtatgatggccacgtgggttctgtggtccccgccatgagctttggatacagcgccttgcactgtgggattttgaacaatattgtggtgctgtgctgcagttactgtgctgatttaagtgagatcagggtgcgctgctgtgcccggaggacaaggcgccttatgctgcgggcggtgcgaatcatcgctgaggagaccactgccatgttgtattcctgcaggacggagcggcggcggcagcagtttattcgcgcgctgctgcagcaccaccgccctatcctgatgcacgattatgactctacccccatgtaagaattcctagagctcgctgatcagcctcgactgtgccttctagttgccagccatctgttgtttgcccctcccccgtgccttccttgaccctggaaggtgccactcccactgtcctttcctaataaaatgaggaaattgcatcgcattgtctgagtaggtgtcattctattctggggggtggggtggggcaggacagcaagggggaggattgggaagagaatagcaggcatgctggggaggccttgttggcctagtgtggcggaagtgtgatgttgcaagtgtggcggaacacatgtaagcgacggatgtggcaaaagtgacgtttttggtgtgcgccggtgtacacaggaagtgacaattttcgcgcggttttaggcggatgttgtagtaaatttgggcgtaaccgagtaagatttggccattttcgcgggaaaactgaataagaggaagtgaaatctgaataattttgtgttactcatagcgcgtaatatttgtctagggccgcggggactttgaccgtttacgtggagactcgcccaggtgtttttctcaggtgttttccgcgttccgggtcaaagttggcgttttattattatagtcagctgacgtgtagtgtatttatacccggtgagttcctcaagaggccactcttgagtgccagcgagtagagttttctcctccgagccgctccgacaccgggactgaaaatgagacatattatctgccacggaggtgttattaccgaagaaatggccgccagtcttttggaccagctgatcgaagaggtactggctgataatcttccacctcctagccattttgaaccacctacccttcacgaactgtatgatttagacgtgacggcccccgaagatcccaacgaggaggcggtttcgcagatttttcccgactctgtaatgttggcggtgcaggaagggattgacttactcacttttccgccggcgcccggttctccggagccgcctcacctttcccggcagcccgagcagccggagcagagagccttgggtccggtttctatgccaaaccttgtaccggaggtgatcgatcttacctgccacgaggctggctttccacccagtgacgacgaggatgaagagggtgaggagtttgtgttagattatgtggagcaccccgggcacggttgcaggtcttgtcattatcaccggaggaatacgggggacccagatattatgtgttcgctttgctatatgaggacctgtggcatgtttgtctacagtaagtgaaaattatgggcagtgggtgatagagtggtgggtttggtgtggtaattttttttttaatttttacagttttgtggtttaaagaattttgtattgtgatttttttaaaaggtcctgtgtctgaacctgagcctgagcccgagccagaaccggagcctgcaagacctacccgccgtcctaaaatggcgcctgctatcctgagacgcccgacatcacctgtgtctagagaatgcaatagtagtacggatagctgtgactccggtccttctaacacacctcctgagatacacccggtggtcccgctgtgccccattaaaccagttgccgtgagagttggtgggcgtcgccaggctgtggaatgtatcgaggacttgcttaacgagcctgggcaacctttggacttgagctgtaaacgccccaggccataatctctagagtcgacactagtgcggatccacgggtggcatccctgtgacccctccccagtgcctctcctggccctggaagttgccactccagtgcccaccagccttgtcctaataaaattaagttgcatcattttgtctgactaggtgtccttctataatattatggggtggaggggggtggtatggagcaaggggcaagttgggaagacaacctgtagggcctgcggggtctattgggaaccaagctggagtgcagtggcacaatcttggctcactgcaatctccgcctcctgggttcaagcgattctcctgcctcagcctcccgagttgttgggattccaggcatgcatgaccaggctcagctaatttttgtttttttggtagagacggggtttcaccatattggccaggctggtctccaactcctaatctcaggtgatctacccaccttggcctcccaaattgctgggattacaggcgtgaaccactgctcccttccctgtccttatcgatagatctggcctgattggccgggtgagataatgtttaacttgcatggcgtgttaaatggggcggggcttaaagggtatataatgcgccgtgggctaatcttggttacatctgacctcatggaggcttgggagtgtttggaagatttttctgctgtgcgtaacttgctggaacagagctctaacagtacctcttggttttggaggtttctgtggggctcatcccaggcaaagttagtctgcagaattaaggaggattacaagtgggaatttgaagagcttttgaaatcctgtggtgagctgtttgattctttgaatctgggtcaccaggcgcttttccaagagaaggtcatcaagactttggatttttccacaccggggcgcgctgcggctgctgttgcttttttgagttttataaaggataaatggagcgaagaaacccatctgagcggggggtacctgctggattttctggccatgcatctgtggagagcggttgtgagacacaagaatcgcctgctactgttgtcttccgtccgcccggcgataataccgacggaggagcagcagcagcagcaggaggaagccaggcggcggcggcaggagcagagcccatggaacccgagagccggcctggaccctcgggaatgaatgttgtacaggtggctgaactgtatccagaactgagacgcattttgacaattacagaggatgggcaggggctaaagggggtaaagagggagcggggggcttgtgaggctacagaggaggctaggaatctagcttttagcttaatgaccagacaccgtcctgagtgtattacttttcaacagatcaaggataattgcgctaatgagcttgatctgctggcgcagaagtattccatagagcagctgaccacttactggctgcagccaggggatgattttgaggaggctattagggtatatgcaaaggtggcacttaggccagattgcaagtacaagatcagcaaacttgtaaatatcaggaattgttgctacatttctgggaacggggccgaggtggagatagatacggaggatagggtggcctttagatgtagcatgataaatatgtggccgggggtgcttggcatggacggggtggttattatgaatgtaaggtttactggccccaattttagcggtacggttttcctggccaataccaaccttatcctacacggtgtaagcttctatgggtttaacaatacctgtgtggaagcctggaccgatgtaagggttcggggctgtgccttttactgctgctggaagggggtggtgtgtcgccccaaaagcagggcttcaattaagaaatgcctctttgaaaggtgtaccttgggtatcctgtctgagggtaactccagggtgcgccacaatgtggcctccgactgtggttgcttcatgctagtgaaaagcgtggctgtgattaagcataacatggtatgtggcaactgcgaggacagggcctctcagatgctgacctgctcggacggcaactgtcacctgctgaagaccattcacgtagccagccactctcgcaaggcctggccagtgtttgagcataacatactgacccgctgttccttgcatttgggtaacaggaggggggtgttcctaccttaccaatgcaatttgagtcacactaagatattgcttgagcccgagagcatgtccaaggtgaacctgaacggggtgtttgacatgaccatgaagatctggaaggtgctgaggtacgatgagacccgcaccaggtgcagaccctgcgagtgtggcggtaaacatattaggaaccagcctgtgatgctggatgtgaccgaggagctgaggcccgatcacttggtgctggcctgcacccgcgctgagtttggctctagcgatgaagatacagattaaaataaaaagacagaataaacctattggttaaaaaatgagctgatttaacggccttcttggccgcccttcccggtcgatatgaacagcttatttacataattcacgttattggtagttataaatgaaattcctaatatcggttatgaagtgaaattgaatttctacttgatctttctctctatttttgtaaaataaaattaagaatatttaaatattcaatgattcatttttgcagaaatcggaggaagaagaatatatgaaaacatttaacatttctcaacaagatccccccatattgttgtataagtgatgaaatactgaatttaaaacttagtttatatgtggtaaaatgttttaatcaagtttaggaggaattaattatgaagtgtaatgaataatgaatgtaacagggttcaattaaaagagggaagcgtatcattaaccctataaactacgtctgccctcattattggagggtgaaatgtgaatacatcctattcacaatcgaatttacgacacaaccaaattttaatttggctttgcattttatctttttttagcgtattaaatgaaatggttttgaacgtctcattacctgatattgcaaatgattttaataaaccaccagcgagtacaaactgggtgaacacagcctttatgttaaccttttccattggaacagctgtatatggaaagctatctgatcaattaggcatcaaaaggttactcctatttggaattataataaattgtttcgggtcggtaattgggtttgttggccattctttcttttccttacttattatggctcgttttattcaaggggctggtgcagctgcatttccagcactcgtaatggttgtagttgcgcgctatattccaaaggaaaataggggtaaagcatttggtcttattggatcgatagtagccatgggagaaggagtcggtccagcgattggtggaatgatagcccattatattcattggtcctatcttctactcattcctatgataacaattatcactgttccgtttcttatgaaattattaaagaaagaagtaaggataaaaggtcattttgatatcaaaggaattatactaatgtctgtaggcattgtattttttatgttgtttacaacatcatatagcatttcttttcttatcgttagcgtgctgtcattcctgatatttgtaaaacatatcaggaaagtaacagatccttttgttgatcccggattagggaaaaatataccttttatgattggagttctttgtgggggaattatatttggaacagtagcagggtttgtctctatggttccttatatgatgaaagatgttcaccagctaagtactgccgaaatcggaagtgtaattattttccctggaacaatgagtgtcattattttcggctacattggtgggatacttgttgatagaagaggtcctttatacgtgttaaacatcggagttacatttctttctgttagctttttaactgcttcctttcttttagaaacaacatcatggttcatgacaattataatcgtatttgttttaggtgggctttcgttcaccaaaacagttatatcaacaattgtttcaagtagcttgaaacagcaggaagctggtgctggaatgagtttgcttaactttaccagctttttatcagagggaacaggtattgcaattgtaggtggtttattatccatacccttacttgatcaaaggttgttacctatggaagttgatcagtcaacttatctgtatagtaatttgttattacttttttcaggaatcattgtcattagttggctggttaccttgaatgtatataaacattctcaaagggatttctaaatcgttaagggatcaactttgggagagagttcaaaattgatcctttttttataacaggaattgggcatcaaataaaacgaaaggctcagtcgaaagactgggcctttcgttttatctgttgtttgtcggtgaacgctctcctgagtaggacaaatccgccgggagcggatttgaacgttgcgaagcaacggcccggagggtggcgggcaggacgcccgccataaactgccaggcatcaaattaagcagaaggccatcctgacggatggcctttttgcgtttctacaaactcttcctgtcgtcatatctacaattctacacagcccagtccagactattgaattgtatcacgtttttgatatcctaccaataacaaattgattggaggaatgcaaagtgaataatgaaccagtaaaacgtggtaagaagaacagatgggaattaaacctacctataatgacttatgtagtagctgatgattggattgataaactaggacacgaaacgtttactttatggttgaggttccatacttgggtagatagagaagatgaactccgagattatgatcgcatacctagaagttttgagaacatatataaaaagacactaggaatctcaaaaagtaagttttatagattgataaaacctttatgggaatatggattaatagacatcatagaatacgaagaatctaaccgtaattctactaaacctaaaaatataattgtttatgagtatcctttacacgaaatagaaagaaagtataaaccactagaaaaattaagagattgggataaagactataattccgtttctaaagaattaggtaaaacaggtggtagaccaaggaaaaaagatagtgaagaagaacccgaaaagaaacccgaagaagtaactaaaaagaaacgtaaatataagttaaaaagagttatccacaacggtttcaaaaatgaaacggtggagggtttcaaaaatgaaacggtggagggtttcaaaaatgaaacggtgaccgtttcaaaaataaaacccaataattattcaaatatctttaataacttatcaaatatttctactaatgtttcaaataatttattaattgatgatgatgaggaaatcgaaaatgaaccaactggtcgtacaataaataggtcattacttttttcacaagaagatattaaacaggcctatcaatttattaatagattttcagttatacagttacgtgaaaactttagctttgataaacactttgaagaacggttggtatgttatttatggaaagcagggatttctactttttacacgcacgaaatcagtaaaatgataaaaaaaatagcagactatgaaaaatctaaaaaaggtagattaaacccaatacgtgaccgagccttatatatggtaaatggtcttgtaatgaatagagcttcttcccaaagtgaacatgctacttataaactaaaccaatataaaaaacagaaggaacaggaaaaacaacaacaggagcaacaaagatcaagagtaccgttctataattggttggaggaaagagaagaacaaaccgaaggtcaactacccaccacttaagcggccgcaagcttgaagagctcttctttcagaacgctcggttgccgccgggcgttttttatgagacgtctcattatactggcttaactatgcggcatcagagcagattgtactgagagtgcaccatatgcggtgtgaaataccgcacagatgcgtaaggagaaaataccgcatcaggcgctcttccgcttcctcgctcactgactcgctgcgctcggtcgttcggctgcggcgagcggtatcagctcactcaaaggcggtaatacggttatccacagaatcaggggataacgcaggaaagaacatgtgagcaaaaggccagcaaaaggccaggaaccgtaaaaaggccgcgttgctggcgtttttccataggctccgcccccctgacgagcatcacaaaaatcgacgctcaagtcagaggtggcgaaacccgacaggactataaagataccaggcgtttccccctggaagctccctcgtgcgctctcctgttccgaccctgccgcttaccggatacctgtccgcctttctcccttcgggaagcgtggcgctttctcatagctcacgctgtaggtatctcagttcggtgtaggtcgttcgctccaagctgggctgtgtgcacgaaccccccgttcagcccgaccgctgcgccttatccggtaactatcgtcttgagtccaacccggtaagacacgacttatcgccactggcagcagccactggtaacaggattagcagagcgaggtatgtaggcggtgctacagagttcttgaagtggtggcctaactacggctacactagaaggacagtatttggtatctgcgctctgctgaagccagttaccttcggaaaaagagttggtagctcttgatccggcaaacaaaccaccgctggtagcggtggtttttttgtttgcaagcagcagattacgcgcagaaaaaaaggatctcaagaagatcctttgatcttttctacggggtctgacgctcagtggaacgaaaactcacgttaagggattttggtcatgagattatcaaaaaggatcttcacctagatccttttaaattaaaaatgaagttttaaatcaatctaaagtatatatgagtaaacttggtctgacagttaccaatgcttaatcagtgaggcacctatctcagcgatctgtctatttcgttcatccatagttgcctgactccccgtcgtgtagataactacgatacgggagggcttaccatctggccccagtgctgcaatgataccgcgagacccacgctcaccggctccagatttatcagcaataaaccagccagccggaagggccgagcgcagaagtggtcctgcaactttatccgcctccatccagtctattaattgttgccgggaagctagagtaagtagttcgccagttaatagtttgcgcaacgttgttgccattgctgcaggcatcgtggtgtcacgctcgtcgtttggtatggcttcattcagctccggttcccaacgatcaaggcgagttacatgatcccccatgttgtgcaaaaaagcggttagctccttcggtcctccgatcgttgtcagaagtaagttggccgcagtgttatcactcatggttatggcagcactgcataattctcttactgtcatgccatccgtaagatgcttttctgtgactggtgagtactcaaccaagtcattctgagaatagtgtatgcggcgaccgagttgctcttgcccggcgtcaacacgggataataccgcgccacatagcagaactttaaaagtgctcatcattggaaaacgttcttcggggcgaaaactctcaaggatcttaccgctgttgagatccagttcgatgtaacccactcgtgcacccaactgatcttcagcatcttttactttcaccagcgtttctgggtgagcaaaaacaggaaggcaaaatgccgcaaaaaagggaataagggcgacacggaaatgttgaatactcatactcttcctttttcaatattattgaagcatttatcagggttattgtctcatgagcggatacatatttgaatgtatttagaaaaataaacaaataggggttccgcgcacatttccccgaaaagtgccacctgacgtctaagaaaccattattatcatgacattaacctataaaaataggcgtatcacgaggccctttcgtcttcaagaattctcatgtttgacagcttatcatcgataagcttg

SEQ ID NO: 238 - DNA, 16014 bp, synthetic construct
  misc_feature 1..16014: note = Seed plasmid #10
  source 1..16014: mol_type = other DNA
ggcctgtttggccacgcggtaggaggaggggagggtgccctgcatgtctgccgctgctcttgctcttgccgctgctgaggaggggggcgcatctgccgcagcaccggatgcatctgggaaaagcaaaaaaggggctcgtccctgtttccggaggaatttgcaagcggggtcttgcatgacggggaggcaaacccccgttcgccgcagtccggccggtccgagactcgaaccgggggtcccgcgactcaacccttggaaaataaccctccggctacagggagcgagccacttaatgctttcgctttccagcctaaccgcttacgctgcgcgcggccagtggccaaaaaagctagcgcagcagccgccgcgcctggaaggaagccaaaaggagcactcccccgttgtctgacgtcgcacacctgggttcgacacgcgggcggtaaccgcatggatcacggcggacggccggatacggggctcgaaccccggtcgtccgccatgatacccttgcgaatttatccaccagaccacggaagagtgcccgcttacaggctctccttttgcacggtctagagcgtcaacgattgcgcgcgcctgaccggccagagcgtcccgaccatggagcactttttgccgctgcgcaacatctggaaccgcgtccgcgactttccgcgcgcctccaccaccgccgccggcatcacctggatgtccaggtacatctaccaattgacatgtgagcaaaaggccagcaaaaggccaggaaccgtaaaaaggccgcgttgctggcgttggccttgatggccccgggtgtggccgctggagatgacgtagttttcgcgcttaaatttgagaaagggcgcgaaactagtccttaagagtcagcgcgcagtatttactgaagagagcctccgcgtcttccagcgtgcgccgaagctgatcttcgcttttgtgatacaggcagctgcggatggccagtcgggaagaggagcagcgcgaaaccacccccgagcgcggacgcggtgcggcgcgacgtcccccaaccatggaggacgtgtcgtccccgtccccgtcgccgccgcctccccgggcgcccccaaaaaagcggatgaggcggcgtatcgagtccgaggacgaggaagactcatcacaagacgcgctggtgccgcgcacacccagcccgcggccatcgacctcggcggcggatttggccattgcgcccaagaagaaaaagaagcgcccttctcccaagcccgagcgcccgccatcaccagaggtaatcgtggacagcgaggaagaaagagaagatgtggcgctacaaatggtgggtttcagcaacccaccggtgctaatcaagcatggcaaaggaggtaagcgcacagtgcggcggctgaatgaagacgacccagtggcgcgtggtatgcggacgcaagaggaagaggaagagcccagcgaagcggaaagtgaaattacggtgatgaacccgctgagtgtgccgatcgtgtctgcgtgggagaagggcatggaggctgcgcgcgcgctgatggacaagtaccacgtggataacgatctaaaggcgaacttcaaactactgcctgaccaagtggaagctctggcggccgtatgcaagacctggctgaacgaggagcaccgcgggttgcagctgaccttcaccagcaacaagacctttgtgacgatgatggggcgattcctgcaggcgtacctgcagtcgtttgcagaggtgacctacaagcatcacgagcccacgggctgcgcgttgtggctgcaccgctgcgctgagatcgaaggcgagcttaagtgtctacacggaagcattatgataaataaggagcacgtgattgaaatggatgtgacgagcgaaaacgggcagcgcgcgctgaaggagcagtctagcaaggccaagatcgtgaagaaccggtggggccgaaatgtggtgcagatctccaacaccgacgcaaggtgctgcgtgcacgacgcggcctgtcctgccaatcagttttccggcaagtcttgcggcatgttcttctctgaaggcgcaaaggctcaggtggcttttaagcagatcaaggcttttatgcaggcgctgtatcctaacgcccagaccgggcacggtcaccttttgatgccactacggtgcgagtgcaactcaaagcctgggcacgcgccctttttgggaaggcagctaccaaagttgactccgttcgccctgagcaacgcggaggacctggacgcggatctgatctccgacaagagcgtgctggccagcgtgcaccacccggcgctgatagtgttccagtgctgcaaccctgtgtatcgcaactcgcgcgcgcagggcggaggccccaactgcgacttcaagatatcggcgcccgacctgctaaacgcgttggtgatggtgcgcagcctgtggagtgaaaacttcaccgagctgccgcggatggttgtgcctgagtttaagtggagcactaaacaccagtatcgcaacgtgtccctgccagtggcgcatagcgatgcgcggcagaacccctttgatttttaagatggccggccgcttcgagcagacatgataagatacattgatgagtttggacaaaccacaactagaatgcagtgaaaaaaatgctttatttgtgaaatttgtgatgctattgctttatttgtaaccattataagctgcaataaacaagttaacaacaacaattgcattcattttatgtttcaggttcagggggaggtgtgggaggttttttaaagcaagtaaaacctctacaaatgtggtagcggccgcggcgctcttccgcttcctcgctcactgactcgctgcgctcggtcgttcggctgcggcgagcggtatcagctcactcaaaggcggtaatacggttatccacagaatcaggggataacgcaggaaagaacatgtgagcaaaaggccagcaaaaggccaggaaccgtaaaaaggccgcgttgctggcgttggcctacttggccggctccggtgcccgtcagtgggcagagcgcacatcgcccacagtccccgagaagttggggggaggggtcggcaattgaaccggtgcctagagaaggtggcgcggggtaaactgggaaagtgatgtcgtgtactggctccgcctttttcccgagggtgggggagaaccgtatataagtgcagtagtcgccgtgaacgttctttttcgcaacgggtttgccgccagaacacaggtaagtgccgtgtgtggttcccgcgggcctggcctctttacgggttatggcccttgcgtgccttgaattacttccacctggctgcagtacgtgattcttgatcccgagcttcgggttggaagtgggtgggagagttcgaggccttgcgcttaaggagccccttcgcctcgtgcttgagttgaggcctggcctgggcgctggggccgccgcgtgcgaatctggtggcaccttcgcgcctgtctcgctgctttcgataagtctctagccatttaaaatttttgatgacctgctgcgacgctttttttctggcaagatagtcttgtaaatgcgggccaagatctgcacactggtatttcggtttttggggccgcgggcggcgacggggcccgtgcgtcccagcgcacatgttcggcgaggcggggcctgcgagcgcggccaccgagaatcggacgggggtagtctcaagctggccggcctgctctggtgcctggtctcgcgccgccgtgtatcgccccgccctgggcggcaaggctggcccggtcggcaccagttgcgtgagcggaaagatggccgcttcccggccctgctgcagggagctcaaaatggaggacgcggcgctcgggagagcgggcgggtgagtcacccacacaaaggaaaagggcctttccgtcctcagccgtcgcttcatgtgactccacggagtaccgggcgccgtccaggcacctcgattagttctcgagcttttggagtacgtcgtctttaggttggggggaggggttttatgcgatggagtttccccacactgagtgggtggagactgaagttaggccagcttggcacttgatgtaattctccttggaatttgccctttttgagtttggatcttggttcattctcaagcctcagacagtggttcaaagtttttttcttccatttcaggtgtcgtgagccaccatgactacgtccggcgttccatttggcatgacactacgaccaacacgatctcggttgtctcggcgcactccgtacagtagggatcgtctacctccttttgagacagaaacccgcgctaccatactggaggatcatccgctgctgcccgaatgtaacactttgacaatgcacaacgtgagttacgtgcgaggtcttccctgcagtgtgggatttacgctgattcaggaatgggttgttccctgggatatggttctaacgcgggaggagcttgtaatcctgaggaagtgtatgcacgtgtgcctgtgttgtgccaacattgatatcatgacgagcatgatgatccatggttacgagtcctgggctctccactgtcattgttccagtcccggttccctgcagtgtatagccggcgggcaggttttggccagctggtttaggatggtggtggatggcgccatgtttaatcagaggtttatatggtaccgggaggtggtgaattacaacatgccaaaagaggtaatgtttatgtccagcgtgtttatgaggggtcgccacttaatctacctgcgcttgtggtatgatggccacgtgggttctgtggtccccgccatgagctttggatacagcgccttgcactgtgggattttgaacaatattgtggtgctgtgctgcagttactgtgctgatttaagtgagatcagggtgcgctgctgtgcccggaggacaaggcgccttatgctgcgggcggtgcgaatcatcgctgaggagaccactgccatgttgtattcctgcaggacggagcggcggcggcagcagtttattcgcgcgctgctgcagcaccaccgccctatcctgatgcacgattatgactctacccccatgtaagaattcctagagctcgctgatcagcctcgactgtgccttctagttgccagccatctgttgtttgcccctcccccgtgccttccttgaccctggaaggtgccactcccactgtcctttcctaataaaatgaggaaattgcatcgcattgtctgagtaggtgtcattctattctggggggtggggtggggcaggacagcaagggggaggattgggaagagaatagcaggcatgctggggaggccttgttggccttctaccgggtaggggaggcgcttttcccaaggcagtctggagcatgcgctttagcagccccgctgggcacttggcgctacacaagtggcctctggcctcgcacacattccacatccaccggtaggcgccaaccggctccgttctttggtggccccttcgcgccaccttctactcctcccctagtcaggaagttcccccccgccccgcagctcgcgtcgtgcaggacgtgacaaatggaagtagcacgtctcactagtctcgtgcagatggacagcaccgctgagcaatggaagcgggtaggcctttggggcagcggccaatagcagctttgctccttcgctttctgggctcagaggctgggaaggggtgggtccgggggcgggctcaggggcgggctcaggggcggggcgggcgcccgaaggtcctccggaggcccggcattctgcacgcttcaaaagcgcacgtctgccgcgctgttctcctcttcctcatctccgggcctttcgacctgccaccatgagacatattatctgccacggaggtgttattaccgaagaaatggccgccagtcttttggaccagctgatcgaagaggtactggctgataatcttccacctcctagccattttgaaccacctacccttcacgaactgtatgatttagacgtgacggcccccgaagatcccaacgaggaggcggtttcgcagatttttcccgactctgtaatgttggcggtgcaggaagggattgacttactcacttttccgccggcgcccggttctccggagccgcctcacctttcccggcagcccgagcagccggagcagagagccttgggtccggtttctatgccaaaccttgtaccggaggtgatcgatcttacctgccacgaggctggctttccacccagtgacgacgaggatgaagagggtgaggagtttgtgttagattatgtggagcaccccgggcacggttgcaggtcttgtcattatcaccggaggaatacgggggacccagatattatgtgttcgctttgctatatgaggacctgtggcatgtttgtctacagtaagtgaaaattatgggcagtgggtgatagagtggtgggtttggtgtggtaattttttttttaatttttacagttttgtggtttaaagaattttgtattgtgatttttttaaaaggtcctgtgtctgaacctgagcctgagcccgagccagaaccggagcctgcaagacctacccgccgtcctaaaatggcgcctgctatcctgagacgcccgacatcacctgtgtctagagaatgcaatagtagtacggatagctgtgactccggtccttctaacacacctcctgagatacacccggtggtcccgctgtgccccattaaaccagttgccgtgagagttggtgggcgtcgccaggctgtggaatgtatcgaggacttgcttaacgagcctgggcaacctttggacttgagctgtaaacgccccaggccataatctctagagtcgacactagtgcggatccacgggtggcatccctgtgacccctccccagtgcctctcctggccctggaagttgccactccagtgcccaccagccttgtcctaataaaattaagttgcatcattttgtctgactaggtgtccttctataatattatggggtggaggggggtggtatggagcaaggggcaagttgggaagacaacctgtagggcctgcggggtctattgggaaccaagctggagtgcagtggcacaatcttggctcactgcaatctccgcctcctgggttcaagcgattctcctgcctcagcctcccgagttgttgggattccaggcatgcatgaccaggctcagctaatttttgtttttttggtagagacggggtttcaccatattggccaggctggtctccaactcctaatctcaggtgatctacccaccttggcctcccaaattgctgggattacaggcgtgaaccactgctcccttccctgtccttatcgatagatctggcctgattggccggtgcagcggcctccgcgccgggttttggcgcctcccgcgggcgcccccctcctcacggcgagcgctgccacgtcagacgaagggcgcagcgagcgtcctgatccttccgcccggacgctcaggacagcggcccgctgctcataagactcggccttagaaccccagtatcagcagaaggacattttaggacgggacttgggtgactctagggcactggttttctttccagagagcggaacaggcgaggaaaagtagtcccttctcggcgattctgcggagggatctccgtggggcggtgaacgccgatgattatataaggacgcgccgggtgtggcacagctagttccgtcgcagccgggatttgggtcgcggttcttgtttgtggatcgctgtgatcgtcacttggtgagtagcgggctgctgggctggccggggctttcgtggccgccgggccgctcggtgggacggaagcgtgtggagagaccgccaagggctgtagtctgggtccgcgagcaaggttgccctgaactgggggttggggggagcgcagcaaaatggcggctgttcccgagtcttgaatggaagacgcttgtgaggcgggctgtgaggtcgttgaaacaaggtggggggcatggtgggcggcaagaacccaaggtcttgaggccttcgctaatgcgggaaagctcttattcgggtgagatgggctggggcaccatctggggaccctgacgtgaagtttgtcactgactggagaactcggtttgtcgtctgttgcgggggcggcagttatggcggtgccgttgggcagtgcacccgtacctttgggagcgcgcgccctcgtcgtgtcgtgacgtcacccgttctgttggcttataatgcagggtggggccacctgccggtaggtgtgcggtaggcttttctccgtcgcaggacgcagggttcgggcctagggtaggctctcctgaatcgacaggcgccggacctctggtgaggggagggataagtgaggcgtcagtttctttggtcggttttatgtacctatcttcttaagtagctgaagctccggttttgaactatgcgctcggggttggcgagtgtgttttgtgaagttttttaggcaccttttgaaatgtaatcatttgggtcaatatgtaattttcagtgttagactagtaaagccaccatggaggcttgggagtgtttggaagatttttctgctgtgcgtaacttgctggaacagagctctaacagtacctcttggttttggaggtttctgtggggctcatcccaggcaaagttagtctgcagaattaaggaggattacaagtgggaatttgaagagcttttgaaatcctgtggtgagctgtttgattctttgaatctgggtcaccaggcgcttttccaagagaaggtcatcaagactttggatttttccacaccggggcgcgctgcggctgctgttgcttttttgagttttataaaggataaatggagcgaagaaacccatctgagcggggggtacctgctggattttctggccatgcatctgtggagagcggttgtgagacacaagaatcgcctgctactgttgtcttccgtccgcccggcgataataccgacggaggagcagcagcagcagcaggaggaagccaggcggcggcggcaggagcagagcccatggaacccgagagccggcctggaccctcgggaatgaatgttgtacaggtggctgaactgtatccagaactgagacgcattttgacaattacagaggatgggcaggggctaaagggggtaaagagggagcggggggcttgtgaggctacagaggaggctaggaatctagcttttagcttaatgaccagacaccgtcctgagtgtattacttttcaacagatcaaggataattgcgctaatgagcttgatctgctggcgcagaagtattccatagagcagctgaccacttactggctgcagccaggggatgattttgaggaggctattagggtatatgcaaaggtggcacttaggccagattgcaagtacaagatcagcaaacttgtaaatatcaggaattgttgctacatttctgggaacggggccgaggtggagatagatacggaggatagggtggcctttagatgtagcatgataaatatgtggccgggggtgcttggcatggacggggtggttattatgaatgtaaggtttactggccccaattttagcggtacggttttcctggccaataccaaccttatcctacacggtgtaagcttctatgggtttaacaatacctgtgtggaagcctggaccgatgtaagggttcggggctgtgccttttactgctgctggaagggggtggtgtgtcgccccaaaagcagggcttcaattaagaaatgcctctttgaaaggtgtaccttgggtatcctgtctgagggtaactccagggtgcgccacaatgtggcctccgactgtggttgcttcatgctagtgaaaagcgtggctgtgattaagcataacatggtatgtggcaactgcgaggacagggcctctcagatgctgacctgctcggacggcaactgtcacctgctgaagaccattcacgtagccagccactctcgcaaggcctggccagtgtttgagcataacatactgacccgctgttccttgcatttgggtaacaggaggggggtgttcctaccttaccaatgcaatttgagtcacactaagatattgcttgagcccgagagcatgtccaaggtgaacctgaacggggtgtttgacatgaccatgaagatctggaaggtgctgaggtacgatgagacccgcaccaggtgcagaccctgcgagtgtggcggtaaacatattaggaaccagcctgtgatgctggatgtgaccgaggagctgaggcccgatcacttggtgctggcctgcacccgcgctgagtttggctctagcgatgaagatacagattaaaataaaaagacagaataaacctattggttaaaaaatgagctgatttaacggccttcttggccgcccttcccggtcgatatgaacagcttatttacataattcacgttattggtagttataaatgaaattcctaatatcggttatgaagtgaaattgaatttctacttgatctttctctctatttttgtaaaataaaattaagaatatttaaatattcaatgattcatttttgcagaaatcggaggaagaagaatatatgaaaacatttaacatttctcaacaagatccccccatattgttgtataagtgatgaaatactgaatttaaaacttagtttatatgtggtaaaatgttttaatcaagtttaggaggaattaattatgaagtgtaatgaataatgaatgtaacagggttcaattaaaagagggaagcgtatcattaaccctataaactacgtctgccctcattattggagggtgaaatgtgaatacatcctattcacaatcgaatttacgacacaaccaaattttaatttggctttgcattttatctttttttagcgtattaaatgaaatggttttgaacgtctcattacctgatattgcaaatgattttaataaaccaccagcgagtacaaactgggtgaacacagcctttatgttaaccttttccattggaacagctgtatatggaaagctatctgatcaattaggcatcaaaaggttactcctatttggaattataataaattgtttcgggtcggtaattgggtttgttggccattctttcttttccttacttattatggctcgttttattcaaggggctggtgcagctgcatttccagcactcgtaatggttgtagttgcgcgctatattccaaaggaaaataggggtaaagcatttggtcttattggatcgatagtagccatgggagaaggagtcggtccagcgattggtggaatgatagcccattatattcattggtcctatcttctactcattcctatgataacaattatcactgttccgtttcttatgaaattattaaagaaagaagtaaggataaaaggtcattttgatatcaaaggaattatactaatgtctgtaggcattgtattttttatgttgtttacaacatcatatagcatttcttttcttatcgttagcgtgctgtcattcctgatatttgtaaaacatatcaggaaagtaacagatccttttgttgatcccggattagggaaaaatataccttttatgattggagttctttgtgggggaattatatttggaacagtagcagggtttgtctctatggttccttatatgatgaaagatgttcaccagctaagtactgccgaaatcggaagtgtaattattttccctggaacaatgagtgtcattattttcggctacattggtgggatacttgttgatagaagaggtcctttatacgtgttaaacatcggagttacatttctttctgttagctttttaactgcttcctttcttttagaaacaacatcatggttcatgacaattataatcgtatttgttttaggtgggctttcgttcaccaaaacagttatatcaacaattgtttcaagtagcttgaaacagcaggaagctggtgctggaatgagtttgcttaactttaccagctttttatcagagggaacaggtattgcaattgtaggtggtttattatccatacccttacttgatcaaaggttgttacctatggaagttgatcagtcaacttatctgtatagtaatttgttattacttttttcaggaatcattgtcattagttggctggttaccttgaatgtatataaacattctcaaagggatttctaaatcgttaagggatcaactttgggagagagttcaaaattgatcctttttttataacaggaattgggcatcaaataaaacgaaaggctcagtcgaaagactgggcctttcgttttatctgttgtttgtcggtgaacgctctcctgagtaggacaaatccgccgggagcggatttgaacgttgcgaagcaacggcccggagggtggcgggcaggacgcccgccataaactgccaggcatcaaattaagcagaaggccatcctgacggatggcctttttgcgtttctacaaactcttcctgtcgtcatatctacaattctacacagcccagtccagactattgaattgtatcacgtttttgatatcctaccaataacaaattgattggaggaatgcaaagtgaataatgaaccagtaaaacgtggtaagaagaacagatgggaattaaacctacctataatgacttatgtagtagctgatgattggattgataaactaggacacgaaacgtttactttatggttgaggttccatacttgggtagatagagaagatgaactccgagattatgatcgcatacctagaagttttgagaacatatataaaaagacactaggaatctcaaaaagtaagttttatagattgataaaacctttatgggaatatggattaatagacatcatagaatacgaagaatctaaccgtaattctactaaacctaaaaatataattgtttatgagtatcctttacacgaaatagaaagaaagtataaaccactagaaaaattaagagattgggataaagactataattccgtttctaaagaattaggtaaaacaggtggtagaccaaggaaaaaagatagtgaagaagaacccgaaaagaaacccgaagaagtaactaaaaagaaacgtaaatataagttaaaaagagttatccacaacggtttcaaaaatgaaacggtggagggtttcaaaaatgaaacggtggagggtttcaaaaatgaaacggtgaccgtttcaaaaataaaacccaataattattcaaatatctttaataacttatcaaatatttctactaatgtttcaaataatttattaattgatgatgatgaggaaatcgaaaatgaaccaactggtcgtacaataaataggtcattacttttttcacaagaagatattaaacaggcctatcaatttattaatagattttcagttatacagttacgtgaaaactttagctttgataaacactttgaagaacggttggtatgttatttatggaaagcagggatttctactttttacacgcacgaaatcagtaaaatgataaaaaaaatagcagactatgaaaaatctaaaaaaggtagattaaacccaatacgtgaccgagccttatatatggtaaatggtcttgtaatgaatagagcttcttcccaaagtgaacatgctacttataaactaaaccaatataaaaaacagaaggaacaggaaaaacaacaacaggagcaacaaagatcaagagtaccgttctataattggttggaggaaagagaagaacaaaccgaaggtcaactacccaccacttaagcggccgcaagcttgaagagctcttctttcagaacgctcggttgccgccgggcgttttttatgagacgtctcattatactggcttaactatgcggcatcagagcagattgtactgagagtgcaccatatgcggtgtgaaataccgcacagatgcgtaaggagaaaataccgcatcaggcgctcttccgcttcctcgctcactgactcgctgcgctcggtcgttcggctgcggcgagcggtatcagctcactcaaaggcggtaatacggttatccacagaatcaggggataacgcaggaaagaacatgtgagcaaaaggccagcaaaaggccaggaaccgtaaaaaggccgcgttgctggcgtttttccataggctccgcccccctgacgagcatcacaaaaatcgacgctcaagtcagaggtggcgaaacccgacaggactataaagataccaggcgtttccccctggaagctccctcgtgcgctctcctgttccgaccctgccgcttaccggatacctgtccgcctttctcccttcgggaagcgtggcgctttctcatagctcacgctgtaggtatctcagttcggtgtaggtcgttcgctccaagctgggctgtgtgcacgaaccccccgttcagcccgaccgctgcgccttatccggtaactatcgtcttgagtccaacccggtaagacacgacttatcgccactggcagcagccactggtaacaggattagcagagcgaggtatgtaggcggtgctacagagttcttgaagtggtggcctaactacggctacactagaaggacagtatttggtatctgcgctctgctgaagccagttaccttcggaaaaagagttggtagctcttgatccggcaaacaaaccaccgctggtagcggtggtttttttgtttgcaagcagcagattacgcgcagaaaaaaaggatctcaagaagatcctttgatcttttctacggggtctgacgctcagtggaacgaaaactcacgttaagggattttggtcatgagattatcaaaaaggatcttcacctagatccttttaaattaaaaatgaagttttaaatcaatctaaagtatatatgagtaaacttggtctgacagttaccaatgcttaatcagtgaggcacctatctcagcgatctgtctatttcgttcatccatagttgcctgactccccgtcgtgtagataactacgatacgggagggcttaccatctggccccagtgctgcaatgataccgcgagacccacgctcaccggctccagatttatcagcaataaaccagccagccggaagggccgagcgcagaagtggtcctgcaactttatccgcctccatccagtctattaattgttgccgggaagctagagtaagtagttcgccagttaatagtttgcgcaacgttgttgccattgctgcaggcatcgtggtgtcacgctcgtcgtttggtatggcttcattcagctccggttcccaacgatcaaggcgagttacatgatcccccatgttgtgcaaaaaagcggttagctccttcggtcctccgatcgttgtcagaagtaagttggccgcagtgttatcactcatggttatggcagcactgcataattctcttactgtcatgccatccgtaagatgcttttctgtgactggtgagtactcaaccaagtcattctgagaatagtgtatgcggcgaccgagttgctcttgcccggcgtcaacacgggataataccgcgccacatagcagaactttaaaagtgctcatcattggaaaacgttcttcggggcgaaaactctcaaggatcttaccgctgttgagatccagttcgatgtaacccactcgtgcacccaactgatcttcagcatcttttactttcaccagcgtttctgggtgagcaaaaacaggaaggcaaaatgccgcaaaaaagggaataagggcgacacggaaatgttgaatactcatactcttcctttttcaatattattgaagcatttatcagggttattgtctcatgagcggatacatatttgaatgtatttagaaaaataaacaaataggggttccgcgcacatttccccgaaaagtgccacctgacgtctaagaaaccattattatcatgacattaacctataaaaataggcgtatcacgaggccctttcgtcttcaagaattctcatgtttgacagcttatcatcgataagcttg

SEQ ID NO: 239 - DNA, 16159 bp, synthetic construct
  misc_feature 1..16159: note = Seed plasmid #11
  source 1..16159: mol_type = other DNA
ggcctgtttggccacgcggtaggaggaggggagggtgccctgcatgtctgccgctgctcttgctcttgccgctgctgaggaggggggcgcatctgccgcagcaccggatgcatctgggaaaagcaaaaaaggggctcgtccctgtttccggaggaatttgcaagcggggtcttgcatgacggggaggcaaacccccgttcgccgcagtccggccggtccgagactcgaaccgggggtcccgcgactcaacccttggaaaataaccctccggctacagggagcgagccacttaatgctttcgctttccagcctaaccgcttacgctgcgcgcggccagtggccaaaaaagctagcgcagcagccgccgcgcctggaaggaagccaaaaggagcactcccccgttgtctgacgtcgcacacctgggttcgacacgcgggcggtaaccgcatggatcacggcggacggccggatacggggctcgaaccccggtcgtccgccatgatacccttgcgaatttatccaccagaccacggaagagtgcccgcttacaggctctccttttgcacggtctagagcgtcaacgattgcgcgcgcctgaccggccagagcgtcccgaccatggagcactttttgccgctgcgcaacatctggaaccgcgtccgcgactttccgcgcgcctccaccaccgccgccggcatcacctggatgtccaggtacatctaccaattgacatgtgagcaaaaggccagcaaaaggccaggaaccgtaaaaaggccgcgttgctggcgttggccttgatggccggtgcagcggcctccgcgccgggttttggcgcctcccgcgggcgcccccctcctcacggcgagcgctgccacgtcagacgaagggcgcagcgagcgtcctgatccttccgcccggacgctcaggacagcggcccgctgctcataagactcggccttagaaccccagtatcagcagaaggacattttaggacgggacttgggtgactctagggcactggttttctttccagagagcggaacaggcgaggaaaagtagtcccttctcggcgattctgcggagggatctccgtggggcggtgaacgccgatgattatataaggacgcgccgggtgtggcacagctagttccgtcgcagccgggatttgggtcgcggttcttgtttgtggatcgctgtgatcgtcacttggtgagtagcgggctgctgggctggccggggctttcgtggccgccgggccgctcggtgggacggaagcgtgtggagagaccgccaagggctgtagtctgggtccgcgagcaaggttgccctgaactgggggttggggggagcgcagcaaaatggcggctgttcccgagtcttgaatggaagacgcttgtgaggcgggctgtgaggtcgttgaaacaaggtggggggcatggtgggcggcaagaacccaaggtcttgaggccttcgctaatgcgggaaagctcttattcgggtgagatgggctggggcaccatctggggaccctgacgtgaagtttgtcactgactggagaactcggtttgtcgtctgttgcgggggcggcagttatggcggtgccgttgggcagtgcacccgtacctttgggagcgcgcgccctcgtcgtgtcgtgacgtcacccgttctgttggcttataatgcagggtggggccacctgccggtaggtgtgcggtaggcttttctccgtcgcaggacgcagggttcgggcctagggtaggctctcctgaatcgacaggcgccggacctctggtgaggggagggataagtgaggcgtcagtttctttggtcggttttatgtacctatcttcttaagtagctgaagctccggttttgaactatgcgctcggggttggcgagtgtgttttgtgaagttttttaggcaccttttgaaatgtaatcatttgggtcaatatgtaattttcagtgttagactagtaaagccaccatggccagtcgggaagaggagcagcgcgaaaccacccccgagcgcggacgcggtgcggcgcgacgtcccccaaccatggaggacgtgtcgtccccgtccccgtcgccgccgcctccccgggcgcccccaaaaaagcggatgaggcggcgtatcgagtccgaggacgaggaagactcatcacaagacgcgctggtgccgcgcacacccagcccgcggccatcgacctcggcggcggatttggccattgcgcccaagaagaaaaagaagcgcccttctcccaagcccgagcgcccgccatcaccagaggtaatcgtggacagcgaggaagaaagagaagatgtggcgctacaaatggtgggtttcagcaacccaccggtgctaatcaagcatggcaaaggaggtaagcgcacagtgcggcggctgaatgaagacgacccagtggcgcgtggtatgcggacgcaagaggaagaggaagagcccagcgaagcggaaagtgaaattacggtgatgaacccgctgagtgtgccgatcgtgtctgcgtgggagaagggcatggaggctgcgcgcgcgctgatggacaagtaccacgtggataacgatctaaaggcgaacttcaaactactgcctgaccaagtggaagctctggcggccgtatgcaagacctggctgaacgaggagcaccgcgggttgcagctgaccttcaccagcaacaagacctttgtgacgatgatggggcgattcctgcaggcgtacctgcagtcgtttgcagaggtgacctacaagcatcacgagcccacgggctgcgcgttgtggctgcaccgctgcgctgagatcgaaggcgagcttaagtgtctacacggaagcattatgataaataaggagcacgtgattgaaatggatgtgacgagcgaaaacgggcagcgcgcgctgaaggagcagtctagcaaggccaagatcgtgaagaaccggtggggccgaaatgtggtgcagatctccaacaccgacgcaaggtgctgcgtgcacgacgcggcctgtcctgccaatcagttttccggcaagtcttgcggcatgttcttctctgaaggcgcaaaggctcaggtggcttttaagcagatcaaggcttttatgcaggcgctgtatcctaacgcccagaccgggcacggtcaccttttgatgccactacggtgcgagtgcaactcaaagcctgggcacgcgccctttttgggaaggcagctaccaaagttgactccgttcgccctgagcaacgcggaggacctggacgcggatctgatctccgacaagagcgtgctggccagcgtgcaccacccggcgctgatagtgttccagtgctgcaaccctgtgtatcgcaactcgcgcgcgcagggcggaggccccaactgcgacttcaagatatcggcgcccgacctgctaaacgcgttggtgatggtgcgcagcctgtggagtgaaaacttcaccgagctgccgcggatggttgtgcctgagtttaagtggagcactaaacaccagtatcgcaacgtgtccctgccagtggcgcatagcgatgcgcggcagaacccctttgatttttaagatggccggccgcttcgagcagacatgataagatacattgatgagtttggacaaaccacaactagaatgcagtgaaaaaaatgctttatttgtgaaatttgtgatgctattgctttatttgtaaccattataagctgcaataaacaagttaacaacaacaattgcattcattttatgtttcaggttcagggggaggtgtgggaggttttttaaagcaagtaaaacctctacaaatgtggtagcggccgcggcgctcttccgcttcctcgctcactgactcgctgcgctcggtcgttcggctgcggcgagcggtatcagctcactcaaaggcggtaatacggttatccacagaatcaggggataacgcaggaaagaacatgtgagcaaaaggccagcaaaaggccaggaaccgtaaaaaggccgcgttgctggcgttggcctacttggccgttttagggcggagtaacttgtatgtgttgggaattgtagttttcttaaaatgggaagttacgtaacgtgggaaaacggaagtgacgatttgaggaagttgtgggttttttggctttcgtttctgggcgtaggttcgcgtgcggttttctgggtgttttttgtggactttaaccgttacgtcattttttagtcctatatatactcgctctgcacttggcccttttttacactgtgactgattgagctggtgccgtgtcgagtggtgtttttttaataggttttcttttttactggtaaggctgactgttatgactacgtccggcgttccatttggcatgacactacgaccaacacgatctcggttgtctcggcgcactccgtacagtagggatcgtctacctccttttgagacagaaacccgcgctaccatactggaggatcatccgctgctgcccgaatgtaacactttgacaatgcacaacgtgagttacgtgcgaggtcttccctgcagtgtgggatttacgctgattcaggaatgggttgttccctgggatatggttctaacgcgggaggagcttgtaatcctgaggaagtgtatgcacgtgtgcctgtgttgtgccaacattgatatcatgacgagcatgatgatccatggttacgagtcctgggctctccactgtcattgttccagtcccggttccctgcagtgtatagccggcgggcaggttttggccagctggtttaggatggtggtggatggcgccatgtttaatcagaggtttatatggtaccgggaggtggtgaattacaacatgccaaaagaggtaatgtttatgtccagcgtgtttatgaggggtcgccacttaatctacctgcgcttgtggtatgatggccacgtgggttctgtggtccccgccatgagctttggatacagcgccttgcactgtgggattttgaacaatattgtggtgctgtgctgcagttactgtgctgatttaagtgagatcagggtgcgctgctgtgcccggaggacaaggcgccttatgctgcgggcggtgcgaatcatcgctgaggagaccactgccatgttgtattcctgcaggacggagcggcggcggcagcagtttattcgcgcgctgctgcagcaccaccgccctatcctgatgcacgattatgactctacccccatgtaagaattcctagagctcgctgatcagcctcgactgtgccttctagttgccagccatctgttgtttgcccctcccccgtgccttccttgaccctggaaggtgccactcccactgtcctttcctaataaaatgaggaaattgcatcgcattgtctgagtaggtgtcattctattctggggggtggggtggggcaggacagcaagggggaggattgggaagagaatagcaggcatgctggggaggccttgttggccggctccggtgcccgtcagtgggcagagcgcacatcgcccacagtccccgagaagttggggggaggggtcggcaattgaaccggtgcctagagaaggtggcgcggggtaaactgggaaagtgatgtcgtgtactggctccgcctttttcccgagggtgggggagaaccgtatataagtgcagtagtcgccgtgaacgttctttttcgcaacgggtttgccgccagaacacaggtaagtgccgtgtgtggttcccgcgggcctggcctctttacgggttatggcccttgcgtgccttgaattacttccacctggctgcagtacgtgattcttgatcccgagcttcgggttggaagtgggtgggagagttcgaggccttgcgcttaaggagccccttcgcctcgtgcttgagttgaggcctggcctgggcgctggggccgccgcgtgcgaatctggtggcaccttcgcgcctgtctcgctgctttcgataagtctctagccatttaaaatttttgatgacctgctgcgacgctttttttctggcaagatagtcttgtaaatgcgggccaagatctgcacactggtatttcggtttttggggccgcgggcggcgacggggcccgtgcgtcccagcgcacatgttcggcgaggcggggcctgcgagcgcggccaccgagaatcggacgggggtagtctcaagctggccggcctgctctggtgcctggtctcgcgccgccgtgtatcgccccgccctgggcggcaaggctggcccggtcggcaccagttgcgtgagcggaaagatggccgcttcccggccctgctgcagggagctcaaaatggaggacgcggcgctcgggagagcgggcgggtgagtcacccacacaaaggaaaagggcctttccgtcctcagccgtcgcttcatgtgactccacggagtaccgggcgccgtccaggcacctcgattagttctcgagcttttggagtacgtcgtctttaggttggggggaggggttttatgcgatggagtttccccacactgagtgggtggagactgaagttaggccagcttggcacttgatgtaattctccttggaatttgccctttttgagtttggatcttggttcattctcaagcctcagacagtggttcaaagtttttttcttccatttcaggtgtcgtgagccaccatgagacatattatctgccacggaggtgttattaccgaagaaatggccgccagtcttttggaccagctgatcgaagaggtactggctgataatcttccacctcctagccattttgaaccacctacccttcacgaactgtatgatttagacgtgacggcccccgaagatcccaacgaggaggcggtttcgcagatttttcccgactctgtaatgttggcggtgcaggaagggattgacttactcacttttccgccggcgcccggttctccggagccgcctcacctttcccggcagcccgagcagccggagcagagagccttgggtccggtttctatgccaaaccttgtaccggaggtgatcgatcttacctgccacgaggctggctttccacccagtgacgacgaggatgaagagggtgaggagtttgtgttagattatgtggagcaccccgggcacggttgcaggtcttgtcattatcaccggaggaatacgggggacccagatattatgtgttcgctttgctatatgaggacctgtggcatgtttgtctacagtaagtgaaaattatgggcagtgggtgatagagtggtgggtttggtgtggtaattttttttttaatttttacagttttgtggtttaaagaattttgtattgtgatttttttaaaaggtcctgtgtctgaacctgagcctgagcccgagccagaaccggagcctgcaagacctacccgccgtcctaaaatggcgcctgctatcctgagacgcccgacatcacctgtgtctagagaatgcaatagtagtacggatagctgtgactccggtccttctaacacacctcctgagatacacccggtggtcccgctgtgccccattaaaccagttgccgtgagagttggtgggcgtcgccaggctgtggaatgtatcgaggacttgcttaacgagcctgggcaacctttggacttgagctgtaaacgccccaggccataatctctagagtcgacactagtgcggatccacgggtggcatccctgtgacccctccccagtgcctctcctggccctggaagttgccactccagtgcccaccagccttgtcctaataaaattaagttgcatcattttgtctgactaggtgtccttctataatattatggggtggaggggggtggtatggagcaaggggcaagttgggaagacaacctgtagggcctgcggggtctattgggaaccaagctggagtgcagtggcacaatcttggctcactgcaatctccgcctcctgggttcaagcgattctcctgcctcagcctcccgagttgttgggattccaggcatgcatgaccaggctcagctaatttttgtttttttggtagagacggggtttcaccatattggccaggctggtctccaactcctaatctcaggtgatctacccaccttggcctcccaaattgctgggattacaggcgtgaaccactgctcccttccctgtccttatcgatagatctggcctgattggccttctaccgggtaggggaggcgcttttcccaaggcagtctggagcatgcgctttagcagccccgctgggcacttggcgctacacaagtggcctctggcctcgcacacattccacatccaccggtaggcgccaaccggctccgttctttggtggccccttcgcgccaccttctactcctcccctagtcaggaagttcccccccgccccgcagctcgcgtcgtgcaggacgtgacaaatggaagtagcacgtctcactagtctcgtgcagatggacagcaccgctgagcaatggaagcgggtaggcctttggggcagcggccaatagcagctttgctccttcgctttctgggctcagaggctgggaaggggtgggtccgggggcgggctcaggggcgggctcaggggcggggcgggcgcccgaaggtcctccggaggcccggcattctgcacgcttcaaaagcgcacgtctgccgcgctgttctcctcttcctcatctccgggcctttcgacctgccaccatggaggcttgggagtgtttggaagatttttctgctgtgcgtaacttgctggaacagagctctaacagtacctcttggttttggaggtttctgtggggctcatcccaggcaaagttagtctgcagaattaaggaggattacaagtgggaatttgaagagcttttgaaatcctgtggtgagctgtttgattctttgaatctgggtcaccaggcgcttttccaagagaaggtcatcaagactttggatttttccacaccggggcgcgctgcggctgctgttgcttttttgagttttataaaggataaatggagcgaagaaacccatctgagcggggggtacctgctggattttctggccatgcatctgtggagagcggttgtgagacacaagaatcgcctgctactgttgtcttccgtccgcccggcgataataccgacggaggagcagcagcagcagcaggaggaagccaggcggcggcggcaggagcagagcccatggaacccgagagccggcctggaccctcgggaatgaatgttgtacaggtggctgaactgtatccagaactgagacgcattttgacaattacagaggatgggcaggggctaaagggggtaaagagggagcggggggcttgtgaggctacagaggaggctaggaatctagcttttagcttaatgaccagacaccgtcctgagtgtattacttttcaacagatcaaggataattgcgctaatgagcttgatctgctggcgcagaagtattccatagagcagctgaccacttactggctgcagccaggggatgattttgaggaggctattagggtatatgcaaaggtggcacttaggccagattgcaagtacaagatcagcaaacttgtaaatatcaggaattgttgctacatttctgggaacggggccgaggtggagatagatacggaggatagggtggcctttagatgtagcatgataaatatgtggccgggggtgcttggcatggacggggtggttattatgaatgtaaggtttactggccccaattttagcggtacggttttcctggccaataccaaccttatcctacacggtgtaagcttctatgggtttaacaatacctgtgtggaagcctggaccgatgtaagggttcggggctgtgccttttactgctgctggaagggggtggtgtgtcgccccaaaagcagggcttcaattaagaaatgcctctttgaaaggtgtaccttgggtatcctgtctgagggtaactccagggtgcgccacaatgtggcctccgactgtggttgcttcatgctagtgaaaagcgtggctgtgattaagcataacatggtatgtggcaactgcgaggacagggcctctcagatgctgacctgctcggacggcaactgtcacctgctgaagaccattcacgtagccagccactctcgcaaggcctggccagtgtttgagcataacatactgacccgctgttccttgcatttgggtaacaggaggggggtgttcctaccttaccaatgcaatttgagtcacactaagatattgcttgagcccgagagcatgtccaaggtgaacctgaacggggtgtttgacatgaccatgaagatctggaaggtgctgaggtacgatgagacccgcaccaggtgcagaccctgcgagtgtggcggtaaacatattaggaaccagcctgtgatgctggatgtgaccgaggagctgaggcccgatcacttggtgctggcctgcacccgcgctgagtttggctctagcgatgaagatacagattaaaataaaaagacagaataaacctattggttaaaaaatgagctgatttaacggccttcttggccgcccttcccggtcgatatgaacagcttatttacataattcacgttattggtagttataaatgaaattcctaatatcggttatgaagtgaaattgaatttctacttgatctttctctctatttttgtaaaataaaattaagaatatttaaatattcaatgattcatttttgcagaaatcggaggaagaagaatatatgaaaacatttaacatttctcaacaagatccccccatattgttgtataagtgatgaaatactgaatttaaaacttagtttatatgtggtaaaatgttttaatcaagtttaggaggaattaattatgaagtgtaatgaataatgaatgtaacagggttcaattaaaagagggaagcgtatcattaaccctataaactacgtctgccctcattattggagggtgaaatgtgaatacatcctattcacaatcgaatttacgacacaaccaaattttaatttggctttgcattttatctttttttagcgtattaaatgaaatggttttgaacgtctcattacctgatattgcaaatgattttaataaaccaccagcgagtacaaactgggtgaacacagcctttatgttaaccttttccattggaacagctgtatatggaaagctatctgatcaattaggcatcaaaaggttactcctatttggaattataataaattgtttcgggtcggtaattgggtttgttggccattctttcttttccttacttattatggctcgttttattcaaggggctggtgcagctgcatttccagcactcgtaatggttgtagttgcgcgctatattccaaaggaaaataggggtaaagcatttggtcttattggatcgatagtagccatgggagaaggagtcggtccagcgattggtggaatgatagcccattatattcattggtcctatcttctactcattcctatgataacaattatcactgttccgtttcttatgaaattattaaagaaagaagtaaggataaaaggtcattttgatatcaaaggaattatactaatgtctgtaggcattgtattttttatgttgtttacaacatcatatagcatttcttttcttatcgttagcgtgctgtcattcctgatatttgtaaaacatatcaggaaagtaacagatccttttgttgatcccggattagggaaaaatataccttttatgattggagttctttgtgggggaattatatttggaacagtagcagggtttgtctctatggttccttatatgatgaaagatgttcaccagctaagtactgccgaaatcggaagtgtaattattttccctggaacaatgagtgtcattattttcggctacattggtgggatacttgttgatagaagaggtcctttatacgtgttaaacatcggagttacatttctttctgttagctttttaactgcttcctttcttttagaaacaacatcatggttcatgacaattataatcgtatttgttttaggtgggctttcgttcaccaaaacagttatatcaacaattgtttcaagtagcttgaaacagcaggaagctggtgctggaatgagtttgcttaactttaccagctttttatcagagggaacaggtattgcaattgtaggtggtttattatccatacccttacttgatcaaaggttgttacctatggaagttgatcagtcaacttatctgtatagtaatttgttattacttttttcaggaatcattgtcattagttggctggttaccttgaatgtatataaacattctcaaagggatttctaaatcgttaagggatcaactttgggagagagttcaaaattgatcctttttttataacaggaattgggcatcaaataaaacgaaaggctcagtcgaaagactgggcctttcgttttatctgttgtttgtcggtgaacgctctcctgagtaggacaaatccgccgggagcggatttgaacgttgcgaagcaacggcccggagggtggcgggcaggacgcccgccataaactgccaggcatcaaattaagcagaaggccatcctgacggatggcctttttgcgtttctacaaactcttcctgtcgtcatatctacaattctacacagcccagtccagactattgaattgtatcacgtttttgatatcctaccaataacaaattgattggaggaatgcaaagtgaataatgaaccagtaaaacgtggtaagaagaacagatgggaattaaacctacctataatgacttatgtagtagctgatgattggattgataaactaggacacgaaacgtttactttatggttgaggttccatacttgggtagatagagaagatgaactccgagattatgatcgcatacctagaagttttgagaacatatataaaaagacactaggaatctcaaaaagtaagttttatagattgataaaacctttatgggaatatggattaatagacatcatagaatacgaagaatctaaccgtaattctactaaacctaaaaatataattgtttatgagtatcctttacacgaaatagaaagaaagtataaaccactagaaaaattaagagattgggataaagactataattccgtttctaaagaattaggtaaaacaggtggtagaccaaggaaaaaagatagtgaagaagaacccgaaaagaaacccgaagaagtaactaaaaagaaacgtaaatataagttaaaaagagttatccacaacggtttcaaaaatgaaacggtggagggtttcaaaaatgaaacggtggagggtttcaaaaatgaaacggtgaccgtttcaaaaataaaacccaataattattcaaatatctttaataacttatcaaatatttctactaatgtttcaaataatttattaattgatgatgatgaggaaatcgaaaatgaaccaactggtcgtacaataaataggtcattacttttttcacaagaagatattaaacaggcctatcaatttattaatagattttcagttatacagttacgtgaaaactttagctttgataaacactttgaagaacggttggtatgttatttatggaaagcagggatttctactttttacacgcacgaaatcagtaaaatgataaaaaaaatagcagactatgaaaaatctaaaaaaggtagattaaacccaatacgtgaccgagccttatatatggtaaatggtcttgtaatgaatagagcttcttcccaaagtgaacatgctacttataaactaaaccaatataaaaaacagaaggaacaggaaaaacaacaacaggagcaacaaagatcaagagtaccgttctataattggttggaggaaagagaagaacaaaccgaaggtcaactacccaccacttaagcggccgcaagcttgaagagctcttctttcagaacgctcggttgccgccgggcgttttttatgagacgtctcattatactggcttaactatgcggcatcagagcagattgtactgagagtgcaccatatgcggtgtgaaataccgcacagatgcgtaaggagaaaataccgcatcaggcgctcttccgcttcctcgctcactgactcgctgcgctcggtcgttcggctgcggcgagcggtatcagctcactcaaaggcggtaatacggttatccacagaatcaggggataacgcaggaaagaacatgtgagcaaaaggccagcaaaaggccaggaaccgtaaaaaggccgcgttgctggcgtttttccataggctccgcccccctgacgagcatcacaaaaatcgacgctcaagtcagaggtggcgaaacccgacaggactataaagataccaggcgtttccccctggaagctccctcgtgcgctctcctgttccgaccctgccgcttaccggatacctgtccgcctttctcccttcgggaagcgtggcgctttctcatagctcacgctgtaggtatctcagttcggtgtaggtcgttcgctccaagctgggctgtgtgcacgaaccccccgttcagcccgaccgctgcgccttatccggtaactatcgtcttgagtccaacccggtaagacacgacttatcgccactggcagcagccactggtaacaggattagcagagcgaggtatgtaggcggtgctacagagttcttgaagtggtggcctaactacggctacactagaaggacagtatttggtatctgcgctctgctgaagccagttaccttcggaaaaagagttggtagctcttgatccggcaaacaaaccaccgctggtagcggtggtttttttgtttgcaagcagcagattacgcgcagaaaaaaaggatctcaagaagatcctttgatcttttctacggggtctgacgctcagtggaacgaaaactcacgttaagggattttggtcatgagattatcaaaaaggatcttcacctagatccttttaaattaaaaatgaagttttaaatcaatctaaagtatatatgagtaaacttggtctgacagttaccaatgcttaatcagtgaggcacctatctcagcgatctgtctatttcgttcatccatagttgcctgactccccgtcgtgtagataactacgatacgggagggcttaccatctggccccagtgctgcaatgataccgcgagacccacgctcaccggctccagatttatcagcaataaaccagccagccggaagggccgagcgcagaagtggtcctgcaactttatccgcctccatccagtctattaattgttgccgggaagctagagtaagtagttcgccagttaatagtttgcgcaacgttgttgccattgctgcaggcatcgtggtgtcacgctcgtcgtttggtatggcttcattcagctccggttcccaacgatcaaggcgagttacatgatcccccatgttgtgcaaaaaagcggttagctccttcggtcctccgatcgttgtcagaagtaagttggccgcagtgttatcactcatggttatggcagcactgcataattctcttactgtcatgccatccgtaagatgcttttctgtgactggtgagtactcaaccaagtcattctgagaatagtgtatgcggcgaccgagttgctcttgcccggcgtcaacacgggataataccgcgccacatagcagaactttaaaagtgctcatcattggaaaacgttcttcggggcgaaaactctcaaggatcttaccgctgttgagatccagttcgatgtaacccactcgtgcacccaactgatcttcagcatcttttactttcaccagcgtttctgggtgagcaaaaacaggaaggcaaaatgccgcaaaaaagggaataagggcgacacggaaatgttgaatactcatactcttcctttttcaatattattgaagcatttatcagggttattgtctcatgagcggatacatatttgaatgtatttagaaaaataaacaaataggggttccgcgcacatttccccgaaaagtgccacctgacgtctaagaaaccattattatcatgacattaacctataaaaataggcgtatcacgaggccctttcgtcttcaagaattctcatgtttgacagcttatcatcgataagcttg

SEQ ID NO: 240 - DNA, 16306 bp, synthetic construct
  misc_feature 1..16306: note = Seed plasmid #12
  source 1..16306: mol_type = other DNA
ggcctgtttggccacgcggtaggaggaggggagggtgccctgcatgtctgccgctgctcttgctcttgccgctgctgaggaggggggcgcatctgccgcagcaccggatgcatctgggaaaagcaaaaaaggggctcgtccctgtttccggaggaatttgcaagcggggtcttgcatgacggggaggcaaacccccgttcgccgcagtccggccggtccgagactcgaaccgggggtcccgcgactcaacccttggaaaataaccctccggctacagggagcgagccacttaatgctttcgctttccagcctaaccgcttacgctgcgcgcggccagtggccaaaaaagctagcgcagcagccgccgcgcctggaaggaagccaaaaggagcactcccccgttgtctgacgtcgcacacctgggttcgacacgcgggcggtaaccgcatggatcacggcggacggccggatacggggctcgaaccccggtcgtccgccatgatacccttgcgaatttatccaccagaccacggaagagtgcccgcttacaggctctccttttgcacggtctagagcgtcaacgattgcgcgcgcctgaccggccagagcgtcccgaccatggagcactttttgccgctgcgcaacatctggaaccgcgtccgcgactttccgcgcgcctccaccaccgccgccggcatcacctggatgtccaggtacatctaccaattgacatgtgagcaaaaggccagcaaaaggccaggaaccgtaaaaaggccgcgttgctggcgttggccttgatggccttctaccgggtaggggaggcgcttttcccaaggcagtctggagcatgcgctttagcagccccgctgggcacttggcgctacacaagtggcctctggcctcgcacacattccacatccaccggtaggcgccaaccggctccgttctttggtggccccttcgcgccaccttctactcctcccctagtcaggaagttcccccccgccccgcagctcgcgtcgtgcaggacgtgacaaatggaagtagcacgtctcactagtctcgtgcagatggacagcaccgctgagcaatggaagcgggtaggcctttggggcagcggccaatagcagctttgctccttcgctttctgggctcagaggctgggaaggggtgggtccgggggcgggctcaggggcgggctcaggggcggggcgggcgcccgaaggtcctccggaggcccggcattctgcacgcttcaaaagcgcacgtctgccgcgctgttctcctcttcctcatctccgggcctttcgacctgccaccatggccagtcgggaagaggagcagcgcgaaaccacccccgagcgcggacgcggtgcggcgcgacgtcccccaaccatggaggacgtgtcgtccccgtccccgtcgccgccgcctccccgggcgcccccaaaaaagcggatgaggcggcgtatcgagtccgaggacgaggaagactcatcacaagacgcgctggtgccgcgcacacccagcccgcggccatcgacctcggcggcggatttggccattgcgcccaagaagaaaaagaagcgcccttctcccaagcccgagcgcccgccatcaccagaggtaatcgtggacagcgaggaagaaagagaagatgtggcgctacaaatggtgggtttcagcaacccaccggtgctaatcaagcatggcaaaggaggtaagcgcacagtgcggcggctgaatgaagacgacccagtggcgcgtggtatgcggacgcaagaggaagaggaagagcccagcgaagcggaaagtgaaattacggtgatgaacccgctgagtgtgccgatcgtgtctgcgtgggagaagggcatggaggctgcgcgcgcgctgatggacaagtaccacgtggataacgatctaaaggcgaacttcaaactactgcctgaccaagtggaagctctggcggccgtatgcaagacctggctgaacgaggagcaccgcgggttgcagctgaccttcaccagcaacaagacctttgtgacgatgatggggcgattcctgcaggcgtacctgcagtcgtttgcagaggtgacctacaagcatcacgagcccacgggctgcgcgttgtggctgcaccgctgcgctgagatcgaaggcgagcttaagtgtctacacggaagcattatgataaataaggagcacgtgattgaaatggatgtgacgagcgaaaacgggcagcgcgcgctgaaggagcagtctagcaaggccaagatcgtgaagaaccggtggggccgaaatgtggtgcagatctccaacaccgacgcaaggtgctgcgtgcacgacgcggcctgtcctgccaatcagttttccggcaagtcttgcggcatgttcttctctgaaggcgcaaaggctcaggtggcttttaagcagatcaaggcttttatgcaggcgctgtatcctaacgcccagaccgggcacggtcaccttttgatgccactacggtgcgagtgcaactcaaagcctgggcacgcgccctttttgggaaggcagctaccaaagttgactccgttcgccctgagcaacgcggaggacctggacgcggatctgatctccgacaagagcgtgctggccagcgtgcaccacccggcgctgatagtgttccagtgctgcaaccctgtgtatcgcaactcgcgcgcgcagggcggaggccccaactgcgacttcaagatatcggcgcccgacctgctaaacgcgttggtgatggtgcgcagcctgtggagtgaaaacttcaccgagctgccgcggatggttgtgcctgagtttaagtggagcactaaacaccagtatcgcaacgtgtccctgccagtggcgcatagcgatgcgcggcagaacccctttgatttttaagatggccggccgcttcgagcagacatgataagatacattgatgagtttggacaaaccacaactagaatgcagtgaaaaaaatgctttatttgtgaaatttgtgatgctattgctttatttgtaaccattataagctgcaataaacaagttaacaacaacaattgcattcattttatgtttcaggttcagggggaggtgtgggaggttttttaaagcaagtaaaacctctacaaatgtggtagcggccgcggcgctcttccgcttcctcgctcactgactcgctgcgctcggtcgttcggctgcggcgagcggtatcagctcactcaaaggcggtaatacggttatccacagaatcaggggataacgcaggaaagaacatgtgagcaaaaggccagcaaaaggccaggaaccgtaaaaaggccgcgttgctggcgttggcctacttggccggtgcagcggcctccgcgccgggttttggcgcctcccgcgggcgcccccctcctcacggcgagcgctgccacgtcagacgaagggcgcagcgagcgtcctgatccttccgcccggacgctcaggacagcggcccgctgctcataagactcggccttagaaccccagtatcagcagaaggacattttaggacgggacttgggtgactctagggcactggttttctttccagagagcggaacaggcgaggaaaagtagtcccttctcggcgattctgcggagggatctccgtggggcggtgaacgccgatgattatataaggacgcgccgggtgtggcacagctagttccgtcgcagccgggatttgggtcgcggttcttgtttgtggatcgctgtgatcgtcacttggtgagtagcgggctgctgggctggccggggctttcgtggccgccgggccgctcggtgggacggaagcgtgtggagagaccgccaagggctgtagtctgggtccgcgagcaaggttgccctgaactgggggttggggggagcgcagcaaaatggcggctgttcccgagtcttgaatggaagacgcttgtgaggcgggctgtgaggtcgttgaaacaaggtggggggcatggtgggcggcaagaacccaaggtcttgaggccttcgctaatgcgggaaagctcttattcgggtgagatgggctggggcaccatctggggaccctgacgtgaagtttgtcactgactggagaactcggtttgtcgtctgttgcgggggcggcagttatggcggtgccgttgggcagtgcacccgtacctttgggagcgcgcgccctcgtcgtgtcgtgacgtcacccgttctgttggcttataatgcagggtggggccacctgccggtaggtgtgcggtaggcttttctccgtcgcaggacgcagggttcgggcctagggtaggctctcctgaatcgacaggcgccggacctctggtgaggggagggataagtgaggcgtcagtttctttggtcggttttatgtacctatcttcttaagtagctgaagctccggttttgaactatgcgctcggggttggcgagtgtgttttgtgaagttttttaggcaccttttgaaatgtaatcatttgggtcaatatgtaattttcagtgttagactagtaaagccaccatgactacgtccggcgttccatttggcatgacactacgaccaacacgatctcggttgtctcggcgcactccgtacagtagggatcgtctacctccttttgagacagaaacccgcgctaccatactggaggatcatccgctgctgcccgaatgtaacactttgacaatgcacaacgtgagttacgtgcgaggtcttccctgcagtgtgggatttacgctgattcaggaatgggttgttccctgggatatggttctaacgcgggaggagcttgtaatcctgaggaagtgtatgcacgtgtgcctgtgttgtgccaacattgatatcatgacgagcatgatgatccatggttacgagtcctgggctctccactgtcattgttccagtcccggttccctgcagtgtatagccggcgggcaggttttggccagctggtttaggatggtggtggatggcgccatgtttaatcagaggtttatatggtaccgggaggtggtgaattacaacatgccaaaagaggtaatgtttatgtccagcgtgtttatgaggggtcgccacttaatctacctgcgcttgtggtatgatggccacgtgggttctgtggtccccgccatgagctttggatacagcgccttgcactgtgggattttgaacaatattgtggtgctgtgctgcagttactgtgctgatttaagtgagatcagggtgcgctgctgtgcccggaggacaaggcgccttatgctgcgggcggtgcgaatcatcgctgaggagaccactgccatgttgtattcctgcaggacggagcggcggcggcagcagtttattcgcgcgctgctgcagcaccaccgccctatcctgatgcacgattatgactctacccccatgtaagaattcctagagctcgctgatcagcctcgactgtgccttctagttgccagccatctgttgtttgcccctcccccgtgccttccttgaccctggaaggtgccactcccactgtcctttcctaataaaatgaggaaattgcatcgcattgtctgagtaggtgtcattctattctggggggtggggtggggcaggacagcaagggggaggattgggaagagaatagcaggcatgctggggaggccttgttggcctagtgtggcggaagtgtgatgttgcaagtgtggcggaacacatgtaagcgacggatgtggcaaaagtgacgtttttggtgtgcgccggtgtacacaggaagtgacaattttcgcgcggttttaggcggatgttgtagtaaatttgggcgtaaccgagtaagatttggccattttcgcgggaaaactgaataagaggaagtgaaatctgaataattttgtgttactcatagcgcgtaatatttgtctagggccgcggggactttgaccgtttacgtggagactcgcccaggtgtttttctcaggtgttttccgcgttccgggtcaaagttggcgttttattattatagtcagctgacgtgtagtgtatttatacccggtgagttcctcaagaggccactcttgagtgccagcgagtagagttttctcctccgagccgctccgacaccgggactgaaaatgagacatattatctgccacggaggtgttattaccgaagaaatggccgccagtcttttggaccagctgatcgaagaggtactggctgataatcttccacctcctagccattttgaaccacctacccttcacgaactgtatgatttagacgtgacggcccccgaagatcccaacgaggaggcggtttcgcagatttttcccgactctgtaatgttggcggtgcaggaagggattgacttactcacttttccgccggcgcccggttctccggagccgcctcacctttcccggcagcccgagcagccggagcagagagccttgggtccggtttctatgccaaaccttgtaccggaggtgatcgatcttacctgccacgaggctggctttccacccagtgacgacgaggatgaagagggtgaggagtttgtgttagattatgtggagcaccccgggcacggttgcaggtcttgtcattatcaccggaggaatacgggggacccagatattatgtgttcgctttgctatatgaggacctgtggcatgtttgtctacagtaagtgaaaattatgggcagtgggtgatagagtggtgggtttggtgtggtaattttttttttaatttttacagttttgtggtttaaagaattttgtattgtgatttttttaaaaggtcctgtgtctgaacctgagcctgagcccgagccagaaccggagcctgcaagacctacccgccgtcctaaaatggcgcctgctatcctgagacgcccgacatcacctgtgtctagagaatgcaatagtagtacggatagctgtgactccggtccttctaacacacctcctgagatacacccggtggtcccgctgtgccccattaaaccagttgccgtgagagttggtgggcgtcgccaggctgtggaatgtatcgaggacttgcttaacgagcctgggcaacctttggacttgagctgtaaacgccccaggccataatctctagagtcgacactagtgcggatccacgggtggcatccctgtgacccctccccagtgcctctcctggccctggaagttgccactccagtgcccaccagccttgtcctaataaaattaagttgcatcattttgtctgactaggtgtccttctataatattatggggtggaggggggtggtatggagcaaggggcaagttgggaagacaacctgtagggcctgcggggtctattgggaaccaagctggagtgcagtggcacaatcttggctcactgcaatctccgcctcctgggttcaagcgattctcctgcctcagcctcccgagttgttgggattccaggcatgcatgaccaggctcagctaatttttgtttttttggtagagacggggtttcaccatattggccaggctggtctccaactcctaatctcaggtgatctacccaccttggcctcccaaattgctgggattacaggcgtgaaccactgctcccttccctgtccttatcgatagatctggcctgattggccggctccggtgcccgtcagtgggcagagcgcacatcgcccacagtccccgagaagttggggggaggggtcggcaattgaaccggtgcctagagaaggtggcgcggggtaaactgggaaagtgatgtcgtgtactggctccgcctttttcccgagggtgggggagaaccgtatataagtgcagtagtcgccgtgaacgttctttttcgcaacgggtttgccgccagaacacaggtaagtgccgtgtgtggttcccgcgggcctggcctctttacgggttatggcccttgcgtgccttgaattacttccacctggctgcagtacgtgattcttgatcccgagcttcgggttggaagtgggtgggagagttcgaggccttgcgcttaaggagccccttcgcctcgtgcttgagttgaggcctggcctgggcgctggggccgccgcgtgcgaatctggtggcaccttcgcgcctgtctcgctgctttcgataagtctctagccatttaaaatttttgatgacctgctgcgacgctttttttctggcaagatagtcttgtaaatgcgggccaagatctgcacactggtatttcggtttttggggccgcgggcggcgacggggcccgtgcgtcccagcgcacatgttcggcgaggcggggcctgcgagcgcggccaccgagaatcggacgggggtagtctcaagctggccggcctgctctggtgcctggtctcgcgccgccgtgtatcgccccgccctgggcggcaaggctggcccggtcggcaccagttgcgtgagcggaaagatggccgcttcccggccctgctgcagggagctcaaaatggaggacgcggcgctcgggagagcgggcgggtgagtcacccacacaaaggaaaagggcctttccgtcctcagccgtcgcttcatgtgactccacggagtaccgggcgccgtccaggcacctcgattagttctcgagcttttggagtacgtcgtctttaggttggggggaggggttttatgcgatggagtttccccacactgagtgggtggagactgaagttaggccagcttggcacttgatgtaattctccttggaatttgccctttttgagtttggatcttggttcattctcaagcctcagacagtggttcaaagtttttttcttccatttcaggtgtcgtgagccaccatggaggcttgggagtgtttggaagatttttctgctgtgcgtaacttgctggaacagagctctaacagtacctcttggttttggaggtttctgtggggctcatcccaggcaaagttagtctgcagaattaaggaggattacaagtgggaatttgaagagcttttgaaatcctgtggtgagctgtttgattctttgaatctgggtcaccaggcgcttttccaagagaaggtcatcaagactttggatttttccacaccggggcgcgctgcggctgctgttgcttttttgagttttataaaggataaatggagcgaagaaacccatctgagcggggggtacctgctggattttctggccatgcatctgtggagagcggttgtgagacacaagaatcgcctgctactgttgtcttccgtccgcccggcgataataccgacggaggagcagcagcagcagcaggaggaagccaggcggcggcggcaggagcagagcccatggaacccgagagccggcctggaccctcgggaatgaatgttgtacaggtggctgaactgtatccagaactgagacgcattttgacaattacagaggatgggcaggggctaaagggggtaaagagggagcggggggcttgtgaggctacagaggaggctaggaatctagcttttagcttaatgaccagacaccgtcctgagtgtattacttttcaacagatcaaggataattgcgctaatgagcttgatctgctggcgcagaagtattccatagagcagctgaccacttactggctgcagccaggggatgattttgaggaggctattagggtatatgcaaaggtggcacttaggccagattgcaagtacaagatcagcaaacttgtaaatatcaggaattgttgctacatttctgggaacggggccgaggtggagatagatacggaggatagggtggcctttagatgtagcatgataaatatgtggccgggggtgcttggcatggacggggtggttattatgaatgtaaggtttactggccccaattttagcggtacggttttcctggccaataccaaccttatcctacacggtgtaagcttctatgggtttaacaatacctgtgtggaagcctggaccgatgtaagggttcggggctgtgccttttactgctgctggaagggggtggtgtgtcgccccaaaagcagggcttcaattaagaaatgcctctttgaaaggtgtaccttgggtatcctgtctgagggtaactccagggtgcgccacaatgtggcctccgactgtggttgcttcatgctagtgaaaagcgtggctgtgattaagcataacatggtatgtggcaactgcgaggacagggcctctcagatgctgacctgctcggacggcaactgtcacctgctgaagaccattcacgtagccagccactctcgcaaggcctggccagtgtttgagcataacatactgacccgctgttccttgcatttgggtaacaggaggggggtgttcctaccttaccaatgcaatttgagtcacactaagatattgcttgagcccgagagcatgtccaaggtgaacctgaacggggtgtttgacatgaccatgaagatctggaaggtgctgaggtacgatgagacccgcaccaggtgcagaccctgcgagtgtggcggtaaacatattaggaaccagcctgtgatgctggatgtgaccgaggagctgaggcccgatcacttggtgctggcctgcacccgcgctgagtttggctctagcgatgaagatacagattaaaataaaaagacagaataaacctattggttaaaaaatgagctgatttaacggccttcttggccgcccttcccggtcgatatgaacagcttatttacataattcacgttattggtagttataaatgaaattcctaatatcggttatgaagtgaaattgaatttctacttgatctttctctctatttttgtaaaataaaattaagaatatttaaatattcaatgattcatttttgcagaaatcggaggaagaagaatatatgaaaacatttaacatttctcaacaagatccccccatattgttgtataagtgatgaaatactgaatttaaaacttagtttatatgtggtaaaatgttttaatcaagtttaggaggaattaattatgaagtgtaatgaataatgaatgtaacagggttcaattaaaagagggaagcgtatcattaaccctataaactacgtctgccctcattattggagggtgaaatgtgaatacatcctattcacaatcgaatttacgacacaaccaaattttaatttggctttgcattttatctttttttagcgtattaaatgaaatggttttgaacgtctcattacctgatattgcaaatgattttaataaaccaccagcgagtacaaactgggtgaacacagcctttatgttaaccttttccattggaacagctgtatatggaaagctatctgatcaattaggcatcaaaaggttactcctatttggaattataataaattgtttcgggtcggtaattgggtttgttggccattctttcttttccttacttattatggctcgttttattcaaggggctggtgcagctgcatttccagcactcgtaatggttgtagttgcgcgctatattccaaaggaaaataggggtaaagcatttggtcttattggatcgatagtagccatgggagaaggagtcggtccagcgattggtggaatgatagcccattatattcattggtcctatcttctactcattcctatgataacaattatcactgttccgtttcttatgaaattattaaagaaagaagtaaggataaaaggtcattttgatatcaaaggaattatactaatgtctgtaggcattgtattttttatgttgtttacaacatcatatagcatttcttttcttatcgttagcgtgctgtcattcctgatatttgtaaaacatatcaggaaagtaacagatccttttgttgatcccggattagggaaaaatataccttttatgattggagttctttgtgggggaattatatttggaacagtagcagggtttgtctctatggttccttatatgatgaaagatgttcaccagctaagtactgccgaaatcggaagtgtaattattttccctggaacaatgagtgtcattattttcggctacattggtgggatacttgttgatagaagaggtcctttatacgtgttaaacatcggagttacatttctttctgttagctttttaactgcttcctttcttttagaaacaacatcatggttcatgacaattataatcgtatttgttttaggtgggctttcgttcaccaaaacagttatatcaacaattgtttcaagtagcttgaaacagcaggaagctggtgctggaatgagtttgcttaactttaccagctttttatcagagggaacaggtattgcaattgtaggtggtttattatccatacccttacttgatcaaaggttgttacctatggaagttgatcagtcaacttatctgtatagtaatttgttattacttttttcaggaatcattgtcattagttggctggttaccttgaatgtatataaacattctcaaagggatttctaaatcgttaagggatcaactttgggagagagttcaaaattgatcctttttttataacaggaattgggcatcaaataaaacgaaaggctcagtcgaaagactgggcctttcgttttatctgttgtttgtcggtgaacgctctcctgagtaggacaaatccgccgggagcggatttgaacgttgcgaagcaacggcccggagggtggcgggcaggacgcccgccataaactgccaggcatcaaattaagcagaaggccatcctgacggatggcctttttgcgtttctacaaactcttcctgtcgtcatatctacaattctacacagcccagtccagactattgaattgtatcacgtttttgatatcctaccaataacaaattgattggaggaatgcaaagtgaataatgaaccagtaaaacgtggtaagaagaacagatgggaattaaacctacctataatgacttatgtagtagctgatgattggattgataaactaggacacgaaacgtttactttatggttgaggttccatacttgggtagatagagaagatgaactccgagattatgatcgcatacctagaagttttgagaacatatataaaaagacactaggaatctcaaaaagtaagttttatagattgataaaacctttatgggaatatggattaatagacatcatagaatacgaagaatctaaccgtaattctactaaacctaaaaatataattgtttatgagtatcctttacacgaaatagaaagaaagtataaaccactagaaaaattaagagattgggataaagactataattccgtttctaaagaattaggtaaaacaggtggtagaccaaggaaaaaagatagtgaagaagaacccgaaaagaaacccgaagaagtaactaaaaagaaacgtaaatataagttaaaaagagttatccacaacggtttcaaaaatgaaacggtggagggtttcaaaaatgaaacggtggagggtttcaaaaatgaaacggtgaccgtttcaaaaataaaacccaataattattcaaatatctttaataacttatcaaatatttctactaatgtttcaaataatttattaattgatgatgatgaggaaatcgaaaatgaaccaactggtcgtacaataaataggtcattacttttttcacaagaagatattaaacaggcctatcaatttattaatagattttcagttatacagttacgtgaaaactttagctttgataaacactttgaagaacggttggtatgttatttatggaaagcagggatttctactttttacacgcacgaaatcagtaaaatgataaaaaaaatagcagactatgaaaaatctaaaaaaggtagattaaacccaatacgtgaccgagccttatatatggtaaatggtcttgtaatgaatagagcttcttcccaaagtgaacatgctacttataaactaaaccaatataaaaaacagaaggaacaggaaaaacaacaacaggagcaacaaagatcaagagtaccgttctataattggttggaggaaagagaagaacaaaccgaaggtcaactacccaccacttaagcggccgcaagcttgaagagctcttctttcagaacgctcggttgccgccgggcgttttttatgagacgtctcattatactggcttaactatgcggcatcagagcagattgtactgagagtgcaccatatgcggtgtgaaataccgcacagatgcgtaaggagaaaataccgcatcaggcgctcttccgcttcctcgctcactgactcgctgcgctcggtcgttcggctgcggcgagcggtatcagctcactcaaaggcggtaatacggttatccacagaatcaggggataacgcaggaaagaacatgtgagcaaaaggccagcaaaaggccaggaaccgtaaaaaggccgcgttgctggcgtttttccataggctccgcccccctgacgagcatcacaaaaatcgacgctcaagtcagaggtggcgaaacccgacaggactataaagataccaggcgtttccccctggaagctccctcgtgcgctctcctgttccgaccctgccgcttaccggatacctgtccgcctttctcccttcgggaagcgtggcgctttctcatagctcacgctgtaggtatctcagttcggtgtaggtcgttcgctccaagctgggctgtgtgcacgaaccccccgttcagcccgaccgctgcgccttatccggtaactatcgtcttgagtccaacccggtaagacacgacttatcgccactggcagcagccactggtaacaggattagcagagcgaggtatgtaggcggtgctacagagttcttgaagtggtggcctaactacggctacactagaaggacagtatttggtatctgcgctctgctgaagccagttaccttcggaaaaagagttggtagctcttgatccggcaaacaaaccaccgctggtagcggtggtttttttgtttgcaagcagcagattacgcgcagaaaaaaaggatctcaagaagatcctttgatcttttctacggggtctgacgctcagtggaacgaaaactcacgttaagggattttggtcatgagattatcaaaaaggatcttcacctagatccttttaaattaaaaatgaagttttaaatcaatctaaagtatatatgagtaaacttggtctgacagttaccaatgcttaatcagtgaggcacctatctcagcgatctgtctatttcgttcatccatagttgcctgactccccgtcgtgtagataactacgatacgggagggcttaccatctggccccagtgctgcaatgataccgcgagacccacgctcaccggctccagatttatcagcaataaaccagccagccggaagggccgagcgcagaagtggtcctgcaactttatccgcctccatccagtctattaattgttgccgggaagctagagtaagtagttcgccagttaatagtttgcgcaacgttgttgccattgctgcaggcatcgtggtgtcacgctcgtcgtttggtatggcttcattcagctccggttcccaacgatcaaggcgagttacatgatcccccatgttgtgcaaaaaagcggttagctccttcggtcctccgatcgttgtcagaagtaagttggccgcagtgttatcactcatggttatggcagcactgcataattctcttactgtcatgccatccgtaagatgcttttctgtgactggtgagtactcaaccaagtcattctgagaatagtgtatgcggcgaccgagttgctcttgcccggcgtcaacacgggataataccgcgccacatagcagaactttaaaagtgctcatcattggaaaacgttcttcggggcgaaaactctcaaggatcttaccgctgttgagatccagttcgatgtaacccactcgtgcacccaactgatcttcagcatcttttactttcaccagcgtttctgggtgagcaaaaacaggaaggcaaaatgccgcaaaaaagggaataagggcgacacggaaatgttgaatactcatactcttcctttttcaatattattgaagcatttatcagggttattgtctcatgagcggatacatatttgaatgtatttagaaaaataaacaaataggggttccgcgcacatttccccgaaaagtgccacctgacgtctaagaaaccattattatcatgacattaacctataaaaataggcgtatcacgaggccctttcgtcttcaagaattctcatgtttgacagcttatcatcgataagcttg

SEQ ID NO: 241 - DNA, 15947 bp, synthetic construct
  misc_feature 1..15947: note = Seed plasmid #13
  source 1..15947: mol_type = other DNA
ggcctgtttggccacgcggtaggaggaggggagggtgccctgcatgtctgccgctgctcttgctcttgccgctgctgaggaggggggcgcatctgccgcagcaccggatgcatctgggaaaagcaaaaaaggggctcgtccctgtttccggaggaatttgcaagcggggtcttgcatgacggggaggcaaacccccgttcgccgcagtccggccggtccgagactcgaaccgggggtcccgcgactcaacccttggaaaataaccctccggctacagggagcgagccacttaatgctttcgctttccagcctaaccgcttacgctgcgcgcggccagtggccaaaaaagctagcgcagcagccgccgcgcctggaaggaagccaaaaggagcactcccccgttgtctgacgtcgcacacctgggttcgacacgcgggcggtaaccgcatggatcacggcggacggccggatacggggctcgaaccccggtcgtccgccatgatacccttgcgaatttatccaccagaccacggaagagtgcccgcttacaggctctccttttgcacggtctagagcgtcaacgattgcgcgcgcctgaccggccagagcgtcccgaccatggagcactttttgccgctgcgcaacatctggaaccgcgtccgcgactttccgcgcgcctccaccaccgccgccggcatcacctggatgtccaggtacatctaccaattgacatgtgagcaaaaggccagcaaaaggccaggaaccgtaaaaaggccgcgttgctggcgttggccttgatggccggctccggtgcccgtcagtgggcagagcgcacatcgcccacagtccccgagaagttggggggaggggtcggcaattgaaccggtgcctagagaaggtggcgcggggtaaactgggaaagtgatgtcgtgtactggctccgcctttttcccgagggtgggggagaaccgtatataagtgcagtagtcgccgtgaacgttctttttcgcaacgggtttgccgccagaacacaggtaagtgccgtgtgtggttcccgcgggcctggcctctttacgggttatggcccttgcgtgccttgaattacttccacctggctgcagtacgtgattcttgatcccgagcttcgggttggaagtgggtgggagagttcgaggccttgcgcttaaggagccccttcgcctcgtgcttgagttgaggcctggcctgggcgctggggccgccgcgtgcgaatctggtggcaccttcgcgcctgtctcgctgctttcgataagtctctagccatttaaaatttttgatgacctgctgcgacgctttttttctggcaagatagtcttgtaaatgcgggccaagatctgcacactggtatttcggtttttggggccgcgggcggcgacggggcccgtgcgtcccagcgcacatgttcggcgaggcggggcctgcgagcgcggccaccgagaatcggacgggggtagtctcaagctggccggcctgctctggtgcctggtctcgcgccgccgtgtatcgccccgccctgggcggcaaggctggcccggtcggcaccagttgcgtgagcggaaagatggccgcttcccggccctgctgcagggagctcaaaatggaggacgcggcgctcgggagagcgggcgggtgagtcacccacacaaaggaaaagggcctttccgtcctcagccgtcgcttcatgtgactccacggagtaccgggcgccgtccaggcacctcgattagttctcgagcttttggagtacgtcgtctttaggttggggggaggggttttatgcgatggagtttccccacactgagtgggtggagactgaagttaggccagcttggcacttgatgtaattctccttggaatttgccctttttgagtttggatcttggttcattctcaagcctcagacagtggttcaaagtttttttcttccatttcaggtgtcgtgagccaccatggccagtcgggaagaggagcagcgcgaaaccacccccgagcgcggacgcggtgcggcgcgacgtcccccaaccatggaggacgtgtcgtccccgtccccgtcgccgccgcctccccgggcgcccccaaaaaagcggatgaggcggcgtatcgagtccgaggacgaggaagactcatcacaagacgcgctggtgccgcgcacacccagcccgcggccatcgacctcggcggcggatttggccattgcgcccaagaagaaaaagaagcgcccttctcccaagcccgagcgcccgccatcaccagaggtaatcgtggacagcgaggaagaaagagaagatgtggcgctacaaatggtgggtttcagcaacccaccggtgctaatcaagcatggcaaaggaggtaagcgcacagtgcggcggctgaatgaagacgacccagtggcgcgtggtatgcggacgcaagaggaagaggaagagcccagcgaagcggaaagtgaaattacggtgatgaacccgctgagtgtgccgatcgtgtctgcgtgggagaagggcatggaggctgcgcgcgcgctgatggacaagtaccacgtggataacgatctaaaggcgaacttcaaactactgcctgaccaagtggaagctctggcggccgtatgcaagacctggctgaacgaggagcaccgcgggttgcagctgaccttcaccagcaacaagacctttgtgacgatgatggggcgattcctgcaggcgtacctgcagtcgtttgcagaggtgacctacaagcatcacgagcccacgggctgcgcgttgtggctgcaccgctgcgctgagatcgaaggcgagcttaagtgtctacacggaagcattatgataaataaggagcacgtgattgaaatggatgtgacgagcgaaaacgggcagcgcgcgctgaaggagcagtctagcaaggccaagatcgtgaagaaccggtggggccgaaatgtggtgcagatctccaacaccgacgcaaggtgctgcgtgcacgacgcggcctgtcctgccaatcagttttccggcaagtcttgcggcatgttcttctctgaaggcgcaaaggctcaggtggcttttaagcagatcaaggcttttatgcaggcgctgtatcctaacgcccagaccgggcacggtcaccttttgatgccactacggtgcgagtgcaactcaaagcctgggcacgcgccctttttgggaaggcagctaccaaagttgactccgttcgccctgagcaacgcggaggacctggacgcggatctgatctccgacaagagcgtgctggccagcgtgcaccacccggcgctgatagtgttccagtgctgcaaccctgtgtatcgcaactcgcgcgcgcagggcggaggccccaactgcgacttcaagatatcggcgcccgacctgctaaacgcgttggtgatggtgcgcagcctgtggagtgaaaacttcaccgagctgccgcggatggttgtgcctgagtttaagtggagcactaaacaccagtatcgcaacgtgtccctgccagtggcgcatagcgatgcgcggcagaacccctttgatttttaagatggccggccgcttcgagcagacatgataagatacattgatgagtttggacaaaccacaactagaatgcagtgaaaaaaatgctttatttgtgaaatttgtgatgctattgctttatttgtaaccattataagctgcaataaacaagttaacaacaacaattgcattcattttatgtttcaggttcagggggaggtgtgggaggttttttaaagcaagtaaaacctctacaaatgtggtagcggccgcggcgctcttccgcttcctcgctcactgactcgctgcgctcggtcgttcggctgcggcgagcggtatcagctcactcaaaggcggtaatacggttatccacagaatcaggggataacgcaggaaagaacatgtgagcaaaaggccagcaaaaggccaggaaccgtaaaaaggccgcgttgctggcgttggcctacttggccttctaccgggtaggggaggcgcttttcccaaggcagtctggagcatgcgctttagcagccccgctgggcacttggcgctacacaagtggcctctggcctcgcacacattccacatccaccggtaggcgccaaccggctccgttctttggtggccccttcgcgccaccttctactcctcccctagtcaggaagttcccccccgccccgcagctcgcgtcgtgcaggacgtgacaaatggaagtagcacgtctcactagtctcgtgcagatggacagcaccgctgagcaatggaagcgggtaggcctttggggcagcggccaatagcagctttgctccttcgctttctgggctcagaggctgggaaggggtgggtccgggggcgggctcaggggcgggctcaggggcggggcgggcgcccgaaggtcctccggaggcccggcattctgcacgcttcaaaagcgcacgtctgccgcgctgttctcctcttcctcatctccgggcctttcgacctgccaccatgactacgtccggcgttccatttggcatgacactacgaccaacacgatctcggttgtctcggcgcactccgtacagtagggatcgtctacctccttttgagacagaaacccgcgctaccatactggaggatcatccgctgctgcccgaatgtaacactttgacaatgcacaacgtgagttacgtgcgaggtcttccctgcagtgtgggatttacgctgattcaggaatgggttgttccctgggatatggttctaacgcgggaggagcttgtaatcctgaggaagtgtatgcacgtgtgcctgtgttgtgccaacattgatatcatgacgagcatgatgatccatggttacgagtcctgggctctccactgtcattgttccagtcccggttccctgcagtgtatagccggcgggcaggttttggccagctggtttaggatggtggtggatggcgccatgtttaatcagaggtttatatggtaccgggaggtggtgaattacaacatgccaaaagaggtaatgtttatgtccagcgtgtttatgaggggtcgccacttaatctacctgcgcttgtggtatgatggccacgtgggttctgtggtccccgccatgagctttggatacagcgccttgcactgtgggattttgaacaatattgtggtgctgtgctgcagttactgtgctgatttaagtgagatcagggtgcgctgctgtgcccggaggacaaggcgccttatgctgcgggcggtgcgaatcatcgctgaggagaccactgccatgttgtattcctgcaggacggagcggcggcggcagcagtttattcgcgcgctgctgcagcaccaccgccctatcctgatgcacgattatgactctacccccatgtaagaattcctagagctcgctgatcagcctcgactgtgccttctagttgccagccatctgttgtttgcccctcccccgtgccttccttgaccctggaaggtgccactcccactgtcctttcctaataaaatgaggaaattgcatcgcattgtctgagtaggtgtcattctattctggggggtggggtggggcaggacagcaagggggaggattgggaagagaatagcaggcatgctggggaggccttgttggccggtgcagcggcctccgcgccgggttttggcgcctcccgcgggcgcccccctcctcacggcgagcgctgccacgtcagacgaagggcgcagcgagcgtcctgatccttccgcccggacgctcaggacagcggcccgctgctcataagactcggccttagaaccccagtatcagcagaaggacattttaggacgggacttgggtgactctagggcactggttttctttccagagagcggaacaggcgaggaaaagtagtcccttctcggcgattctgcggagggatctccgtggggcggtgaacgccgatgattatataaggacgcgccgggtgtggcacagctagttccgtcgcagccgggatttgggtcgcggttcttgtttgtggatcgctgtgatcgtcacttggtgagtagcgggctgctgggctggccggggctttcgtggccgccgggccgctcggtgggacggaagcgtgtggagagaccgccaagggctgtagtctgggtccgcgagcaaggttgccctgaactgggggttggggggagcgcagcaaaatggcggctgttcccgagtcttgaatggaagacgcttgtgaggcgggctgtgaggtcgttgaaacaaggtggggggcatggtgggcggcaagaacccaaggtcttgaggccttcgctaatgcgggaaagctcttattcgggtgagatgggctggggcaccatctggggaccctgacgtgaagtttgtcactgactggagaactcggtttgtcgtctgttgcgggggcggcagttatggcggtgccgttgggcagtgcacccgtacctttgggagcgcgcgccctcgtcgtgtcgtgacgtcacccgttctgttggcttataatgcagggtggggccacctgccggtaggtgtgcggtaggcttttctccgtcgcaggacgcagggttcgggcctagggtaggctctcctgaatcgacaggcgccggacctctggtgaggggagggataagtgaggcgtcagtttctttggtcggttttatgtacctatcttcttaagtagctgaagctccggttttgaactatgcgctcggggttggcgagtgtgttttgtgaagttttttaggcaccttttgaaatgtaatcatttgggtcaatatgtaattttcagtgttagactagtaaagccaccatgagacatattatctgccacggaggtgttattaccgaagaaatggccgccagtcttttggaccagctgatcgaagaggtactggctgataatcttccacctcctagccattttgaaccacctacccttcacgaactgtatgatttagacgtgacggcccccgaagatcccaacgaggaggcggtttcgcagatttttcccgactctgtaatgttggcggtgcaggaagggattgacttactcacttttccgccggcgcccggttctccggagccgcctcacctttcccggcagcccgagcagccggagcagagagccttgggtccggtttctatgccaaaccttgtaccggaggtgatcgatcttacctgccacgaggctggctttccacccagtgacgacgaggatgaagagggtgaggagtttgtgttagattatgtggagcaccccgggcacggttgcaggtcttgtcattatcaccggaggaatacgggggacccagatattatgtgttcgctttgctatatgaggacctgtggcatgtttgtctacagtaagtgaaaattatgggcagtgggtgatagagtggtgggtttggtgtggtaattttttttttaatttttacagttttgtggtttaaagaattttgtattgtgatttttttaaaaggtcctgtgtctgaacctgagcctgagcccgagccagaaccggagcctgcaagacctacccgccgtcctaaaatggcgcctgctatcctgagacgcccgacatcacctgtgtctagagaatgcaatagtagtacggatagctgtgactccggtccttctaacacacctcctgagatacacccggtggtcccgctgtgccccattaaaccagttgccgtgagagttggtgggcgtcgccaggctgtggaatgtatcgaggacttgcttaacgagcctgggcaacctttggacttgagctgtaaacgccccaggccataatctctagagtcgacactagtgcggatccacgggtggcatccctgtgacccctccccagtgcctctcctggccctggaagttgccactccagtgcccaccagccttgtcctaataaaattaagttgcatcattttgtctgactaggtgtccttctataatattatggggtggaggggggtggtatggagcaaggggcaagttgggaagacaacctgtagggcctgcggggtctattgggaaccaagctggagtgcagtggcacaatcttggctcactgcaatctccgcctcctgggttcaagcgattctcctgcctcagcctcccgagttgttgggattccaggcatgcatgaccaggctcagctaatttttgtttttttggtagagacggggtttcaccatattggccaggctggtctccaactcctaatctcaggtgatctacccaccttggcctcccaaattgctgggattacaggcgtgaaccactgctcccttccctgtccttatcgatagatctggcctgattggccgggtgagataatgtttaacttgcatggcgtgttaaatggggcggggcttaaagggtatataatgcgccgtgggctaatcttggttacatctgacctcatggaggcttgggagtgtttggaagatttttctgctgtgcgtaacttgctggaacagagctctaacagtacctcttggttttggaggtttctgtggggctcatcccaggcaaagttagtctgcagaattaaggaggattacaagtgggaatttgaagagcttttgaaatcctgtggtgagctgtttgattctttgaatctgggtcaccaggcgcttttccaagagaaggtcatcaagactttggatttttccacaccggggcgcgctgcggctgctgttgcttttttgagttttataaaggataaatggagcgaagaaacccatctgagcggggggtacctgctggattttctggccatgcatctgtggagagcggttgtgagacacaagaatcgcctgctactgttgtcttccgtccgcccggcgataataccgacggaggagcagcagcagcagcaggaggaagccaggcggcggcggcaggagcagagcccatggaacccgagagccggcctggaccctcgggaatgaatgttgtacaggtggctgaactgtatccagaactgagacgcattttgacaattacagaggatgggcaggggctaaagggggtaaagagggagcggggggcttgtgaggctacagaggaggctaggaatctagcttttagcttaatgaccagacaccgtcctgagtgtattacttttcaacagatcaaggataattgcgctaatgagcttgatctgctggcgcagaagtattccatagagcagctgaccacttactggctgcagccaggggatgattttgaggaggctattagggtatatgcaaaggtggcacttaggccagattgcaagtacaagatcagcaaacttgtaaatatcaggaattgttgctacatttctgggaacggggccgaggtggagatagatacggaggatagggtggcctttagatgtagcatgataaatatgtggccgggggtgcttggcatggacggggtggttattatgaatgtaaggtttactggccccaattttagcggtacggttttcctggccaataccaaccttatcctacacggtgtaagcttctatgggtttaacaatacctgtgtggaagcctggaccgatgtaagggttcggggctgtgccttttactgctgctggaagggggtggtgtgtcgccccaaaagcagggcttcaattaagaaatgcctctttgaaaggtgtaccttgggtatcctgtctgagggtaactccagggtgcgccacaatgtggcctccgactgtggttgcttcatgctagtgaaaagcgtggctgtgattaagcataacatggtatgtggcaactgcgaggacagggcctctcagatgctgacctgctcggacggcaactgtcacctgctgaagaccattcacgtagccagccactctcgcaaggcctggccagtgtttgagcataacatactgacccgctgttccttgcatttgggtaacaggaggggggtgttcctaccttaccaatgcaatttgagtcacactaagatattgcttgagcccgagagcatgtccaaggtgaacctgaacggggtgtttgacatgaccatgaagatctggaaggtgctgaggtacgatgagacccgcaccaggtgcagaccctgcgagtgtggcggtaaacatattaggaaccagcctgtgatgctggatgtgaccgaggagctgaggcccgatcacttggtgctggcctgcacccgcgctgagtttggctctagcgatgaagatacagattaaaataaaaagacagaataaacctattggttaaaaaatgagctgatttaacggccttcttggccgcccttcccggtcgatatgaacagcttatttacataattcacgttattggtagttataaatgaaattcctaatatcggttatgaagtgaaattgaatttctacttgatctttctctctatttttgtaaaataaaattaagaatatttaaatattcaatgattcatttttgcagaaatcggaggaagaagaatatatgaaaacatttaacatttctcaacaagatccccccatattgttgtataagtgatgaaatactgaatttaaaacttagtttatatgtggtaaaatgttttaatcaagtttaggaggaattaattatgaagtgtaatgaataatgaatgtaacagggttcaattaaaagagggaagcgtatcattaaccctataaactacgtctgccctcattattggagggtgaaatgtgaatacatcctattcacaatcgaatttacgacacaaccaaattttaatttggctttgcattttatctttttttagcgtattaaatgaaatggttttgaacgtctcattacctgatattgcaaatgattttaataaaccaccagcgagtacaaactgggtgaacacagcctttatgttaaccttttccattggaacagctgtatatggaaagctatctgatcaattaggcatcaaaaggttactcctatttggaattataataaattgtttcgggtcggtaattgggtttgttggccattctttcttttccttacttattatggctcgttttattcaaggggctggtgcagctgcatttccagcactcgtaatggttgtagttgcgcgctatattccaaaggaaaataggggtaaagcatttggtcttattggatcgatagtagccatgggagaaggagtcggtccagcgattggtggaatgatagcccattatattcattggtcctatcttctactcattcctatgataacaattatcactgttccgtttcttatgaaattattaaagaaagaagtaaggataaaaggtcattttgatatcaaaggaattatactaatgtctgtaggcattgtattttttatgttgtttacaacatcatatagcatttcttttcttatcgttagcgtgctgtcattcctgatatttgtaaaacatatcaggaaagtaacagatccttttgttgatcccggattagggaaaaatataccttttatgattggagttctttgtgggggaattatatttggaacagtagcagggtttgtctctatggttccttatatgatgaaagatgttcaccagctaagtactgccgaaatcggaagtgtaattattttccctggaacaatgagtgtcattattttcggctacattggtgggatacttgttgatagaagaggtcctttatacgtgttaaacatcggagttacatttctttctgttagctttttaactgcttcctttcttttagaaacaacatcatggttcatgacaattataatcgtatttgttttaggtgggctttcgttcaccaaaacagttatatcaacaattgtttcaagtagcttgaaacagcaggaagctggtgctggaatgagtttgcttaactttaccagctttttatcagagggaacaggtattgcaattgtaggtggtttattatccatacccttacttgatcaaaggttgttacctatggaagttgatcagtcaacttatctgtatagtaatttgttattacttttttcaggaatcattgtcattagttggctggttaccttgaatgtatataaacattctcaaagggatttctaaatcgttaagggatcaactttgggagagagttcaaaattgatcctttttttataacaggaattgggcatcaaataaaacgaaaggctcagtcgaaagactgggcctttcgttttatctgttgtttgtcggtgaacgctctcctgagtaggacaaatccgccgggagcggatttgaacgttgcgaagcaacggcccggagggtggcgggcaggacgcccgccataaactgccaggcatcaaattaagcagaaggccatcctgacggatggcctttttgcgtttctacaaactcttcctgtcgtcatatctacaattctacacagcccagtccagactattgaattgtatcacgtttttgatatcctaccaataacaaattgattggaggaatgcaaagtgaataatgaaccagtaaaacgtggtaagaagaacagatgggaattaaacctacctataatgacttatgtagtagctgatgattggattgataaactaggacacgaaacgtttactttatggttgaggttccatacttgggtagatagagaagatgaactccgagattatgatcgcatacctagaagttttgagaacatatataaaaagacactaggaatctcaaaaagtaagttttatagattgataaaacctttatgggaatatggattaatagacatcatagaatacgaagaatctaaccgtaattctactaaacctaaaaatataattgtttatgagtatcctttacacgaaatagaaagaaagtataaaccactagaaaaattaagagattgggataaagactataattccgtttctaaagaattaggtaaaacaggtggtagaccaaggaaaaaagatagtgaagaagaacccgaaaagaaacccgaagaagtaactaaaaagaaacgtaaatataagttaaaaagagttatccacaacggtttcaaaaatgaaacggtggagggtttcaaaaatgaaacggtggagggtttcaaaaatgaaacggtgaccgtttcaaaaataaaacccaataattattcaaatatctttaataacttatcaaatatttctactaatgtttcaaataatttattaattgatgatgatgaggaaatcgaaaatgaaccaactggtcgtacaataaataggtcattacttttttcacaagaagatattaaacaggcctatcaatttattaatagattttcagttatacagttacgtgaaaactttagctttgataaacactttgaagaacggttggtatgttatttatggaaagcagggatttctactttttacacgcacgaaatcagtaaaatgataaaaaaaatagcagactatgaaaaatctaaaaaaggtagattaaacccaatacgtgaccgagccttatatatggtaaatggtcttgtaatgaatagagcttcttcccaaagtgaacatgctacttataaactaaaccaatataaaaaacagaaggaacaggaaaaacaacaacaggagcaacaaagatcaagagtaccgttctataattggttggaggaaagagaagaacaaaccgaaggtcaactacccaccacttaagcggccgcaagcttgaagagctcttctttcagaacgctcggttgccgccgggcgttttttatgagacgtctcattatactggcttaactatgcggcatcagagcagattgtactgagagtgcaccatatgcggtgtgaaataccgcacagatgcgtaaggagaaaataccgcatcaggcgctcttccgcttcctcgctcactgactcgctgcgctcggtcgttcggctgcggcgagcggtatcagctcactcaaaggcggtaatacggttatccacagaatcaggggataacgcaggaaagaacatgtgagcaaaaggccagcaaaaggccaggaaccgtaaaaaggccgcgttgctggcgtttttccataggctccgcccccctgacgagcatcacaaaaatcgacgctcaagtcagaggtggcgaaacccgacaggactataaagataccaggcgtttccccctggaagctccctcgtgcgctctcctgttccgaccctgccgcttaccggatacctgtccgcctttctcccttcgggaagcgtggcgctttctcatagctcacgctgtaggtatctcagttcggtgtaggtcgttcgctccaagctgggctgtgtgcacgaaccccccgttcagcccgaccgctgcgccttatccggtaactatcgtcttgagtccaacccggtaagacacgacttatcgccactggcagcagccactggtaacaggattagcagagcgaggtatgtaggcggtgctacagagttcttgaagtggtggcctaactacggctacactagaaggacagtatttggtatctgcgctctgctgaagccagttaccttcggaaaaagagttggtagctcttgatccggcaaacaaaccaccgctggtagcggtggtttttttgtttgcaagcagcagattacgcgcagaaaaaaaggatctcaagaagatcctttgatcttttctacggggtctgacgctcagtggaacgaaaactcacgttaagggattttggtcatgagattatcaaaaaggatcttcacctagatccttttaaattaaaaatgaagttttaaatcaatctaaagtatatatgagtaaacttggtctgacagttaccaatgcttaatcagtgaggcacctatctcagcgatctgtctatttcgttcatccatagttgcctgactccccgtcgtgtagataactacgatacgggagggcttaccatctggccccagtgctgcaatgataccgcgagacccacgctcaccggctccagatttatcagcaataaaccagccagccggaagggccgagcgcagaagtggtcctgcaactttatccgcctccatccagtctattaattgttgccgggaagctagagtaagtagttcgccagttaatagtttgcgcaacgttgttgccattgctgcaggcatcgtggtgtcacgctcgtcgtttggtatggcttcattcagctccggttcccaacgatcaaggcgagttacatgatcccccatgttgtgcaaaaaagcggttagctccttcggtcctccgatcgttgtcagaagtaagttggccgcagtgttatcactcatggttatggcagcactgcataattctcttactgtcatgccatccgtaagatgcttttctgtgactggtgagtactcaaccaagtcattctgagaatagtgtatgcggcgaccgagttgctcttgcccggcgtcaacacgggataataccgcgccacatagcagaactttaaaagtgctcatcattggaaaacgttcttcggggcgaaaactctcaaggatcttaccgctgttgagatccagttcgatgtaacccactcgtgcacccaactgatcttcagcatcttttactttcaccagcgtttctgggtgagcaaaaacaggaaggcaaaatgccgcaaaaaagggaataagggcgacacggaaatgttgaatactcatactcttcctttttcaatattattgaagcatttatcagggttattgtctcatgagcggatacatatttgaatgtatttagaaaaataaacaaataggggttccgcgcacatttccccgaaaagtgccacctgacgtctaagaaaccattattatcatgacattaacctataaaaataggcgtatcacgaggccctttcgtcttcaagaattctcatgtttgacagcttatcatcgataagcttg

SEQ ID NO: 242 - DNA, 15496 bp, synthetic construct
  misc_feature 1..15496: note = Seed plasmid #14
  source 1..15496: mol_type = other DNA
ggcctgtttggccacgcggtaggaggaggggagggtgccctgcatgtctgccgctgctcttgctcttgccgctgctgaggaggggggcgcatctgccgcagcaccggatgcatctgggaaaagcaaaaaaggggctcgtccctgtttccggaggaatttgcaagcggggtcttgcatgacggggaggcaaacccccgttcgccgcagtccggccggtccgagactcgaaccgggggtcccgcgactcaacccttggaaaataaccctccggctacagggagcgagccacttaatgctttcgctttccagcctaaccgcttacgctgcgcgcggccagtggccaaaaaagctagcgcagcagccgccgcgcctggaaggaagccaaaaggagcactcccccgttgtctgacgtcgcacacctgggttcgacacgcgggcggtaaccgcatggatcacggcggacggccggatacggggctcgaaccccggtcgtccgccatgatacccttgcgaatttatccaccagaccacggaagagtgcccgcttacaggctctccttttgcacggtctagagcgtcaacgattgcgcgcgcctgaccggccagagcgtcccgaccatggagcactttttgccgctgcgcaacatctggaaccgcgtccgcgactttccgcgcgcctccaccaccgccgccggcatcacctggatgtccaggtacatctaccaattgacatgtgagcaaaaggccagcaaaaggccaggaaccgtaaaaaggccgcgttgctggcgttggccttgatggccccgggtgtggccgctggagatgacgtagttttcgcgcttaaatttgagaaagggcgcgaaactagtccttaagagtcagcgcgcagtatttactgaagagagcctccgcgtcttccagcgtgcgccgaagctgatcttcgcttttgtgatacaggcagctgcggatggccagtcgggaagaggagcagcgcgaaaccacccccgagcgcggacgcggtgcggcgcgacgtcccccaaccatggaggacgtgtcgtccccgtccccgtcgccgccgcctccccgggcgcccccaaaaaagcggatgaggcggcgtatcgagtccgaggacgaggaagactcatcacaagacgcgctggtgccgcgcacacccagcccgcggccatcgacctcggcggcggatttggccattgcgcccaagaagaaaaagaagcgcccttctcccaagcccgagcgcccgccatcaccagaggtaatcgtggacagcgaggaagaaagagaagatgtggcgctacaaatggtgggtttcagcaacccaccggtgctaatcaagcatggcaaaggaggtaagcgcacagtgcggcggctgaatgaagacgacccagtggcgcgtggtatgcggacgcaagaggaagaggaagagcccagcgaagcggaaagtgaaattacggtgatgaacccgctgagtgtgccgatcgtgtctgcgtgggagaagggcatggaggctgcgcgcgcgctgatggacaagtaccacgtggataacgatctaaaggcgaacttcaaactactgcctgaccaagtggaagctctggcggccgtatgcaagacctggctgaacgaggagcaccgcgggttgcagctgaccttcaccagcaacaagacctttgtgacgatgatggggcgattcctgcaggcgtacctgcagtcgtttgcagaggtgacctacaagcatcacgagcccacgggctgcgcgttgtggctgcaccgctgcgctgagatcgaaggcgagcttaagtgtctacacggaagcattatgataaataaggagcacgtgattgaaatggatgtgacgagcgaaaacgggcagcgcgcgctgaaggagcagtctagcaaggccaagatcgtgaagaaccggtggggccgaaatgtggtgcagatctccaacaccgacgcaaggtgctgcgtgcacgacgcggcctgtcctgccaatcagttttccggcaagtcttgcggcatgttcttctctgaaggcgcaaaggctcaggtggcttttaagcagatcaaggcttttatgcaggcgctgtatcctaacgcccagaccgggcacggtcaccttttgatgccactacggtgcgagtgcaactcaaagcctgggcacgcgccctttttgggaaggcagctaccaaagttgactccgttcgccctgagcaacgcggaggacctggacgcggatctgatctccgacaagagcgtgctggccagcgtgcaccacccggcgctgatagtgttccagtgctgcaaccctgtgtatcgcaactcgcgcgcgcagggcggaggccccaactgcgacttcaagatatcggcgcccgacctgctaaacgcgttggtgatggtgcgcagcctgtggagtgaaaacttcaccgagctgccgcggatggttgtgcctgagtttaagtggagcactaaacaccagtatcgcaacgtgtccctgccagtggcgcatagcgatgcgcggcagaacccctttgatttttaagatggccggccgcttcgagcagacatgataagatacattgatgagtttggacaaaccacaactagaatgcagtgaaaaaaatgctttatttgtgaaatttgtgatgctattgctttatttgtaaccattataagctgcaataaacaagttaacaacaacaattgcattcattttatgtttcaggttcagggggaggtgtgggaggttttttaaagcaagtaaaacctctacaaatgtggtagcggccgcggcgctcttccgcttcctcgctcactgactcgctgcgctcggtcgttcggctgcggcgagcggtatcagctcactcaaaggcggtaatacggttatccacagaatcaggggataacgcaggaaagaacatgtgagcaaaaggccagcaaaaggccaggaaccgtaaaaaggccgcgttgctggcgttggcctacttggccgttttagggcggagtaacttgtatgtgttgggaattgtagttttcttaaaatgggaagttacgtaacgtgggaaaacggaagtgacgatttgaggaagttgtgggttttttggctttcgtttctgggcgtaggttcgcgtgcggttttctgggtgttttttgtggactttaaccgttacgtcattttttagtcctatatatactcgctctgcacttggcccttttttacactgtgactgattgagctggtgccgtgtcgagtggtgtttttttaataggttttcttttttactggtaaggctgactgttatgactacgtccggcgttccatttggcatgacactacgaccaacacgatctcggttgtctcggcgcactccgtacagtagggatcgtctacctccttttgagacagaaacccgcgctaccatactggaggatcatccgctgctgcccgaatgtaacactttgacaatgcacaacgtgagttacgtgcgaggtcttccctgcagtgtgggatttacgctgattcaggaatgggttgttccctgggatatggttctaacgcgggaggagcttgtaatcctgaggaagtgtatgcacgtgtgcctgtgttgtgccaacattgatatcatgacgagcatgatgatccatggttacgagtcctgggctctccactgtcattgttccagtcccggttccctgcagtgtatagccggcgggcaggttttggccagctggtttaggatggtggtggatggcgccatgtttaatcagaggtttatatggtaccgggaggtggtgaattacaacatgccaaaagaggtaatgtttatgtccagcgtgtttatgaggggtcgccacttaatctacctgcgcttgtggtatgatggccacgtgggttctgtggtccccgccatgagctttggatacagcgccttgcactgtgggattttgaacaatattgtggtgctgtgctgcagttactgtgctgatttaagtgagatcagggtgcgctgctgtgcccggaggacaaggcgccttatgctgcgggcggtgcgaatcatcgctgaggagaccactgccatgttgtattcctgcaggacggagcggcggcggcagcagtttattcgcgcgctgctgcagcaccaccgccctatcctgatgcacgattatgactctacccccatgtaagaattcctagagctcgctgatcagcctcgactgtgccttctagttgccagccatctgttgtttgcccctcccccgtgccttccttgaccctggaaggtgccactcccactgtcctttcctaataaaatgaggaaattgcatcgcattgtctgagtaggtgtcattctattctggggggtggggtggggcaggacagcaagggggaggattgggaagagaatagcaggcatgctggggaggccttgttggccaggtgacaaagcaggaagtcaaagagttcttccgctgggcgcaggatcacgtgaccgaggtggcgcatgagttctacgtcagaaagggtggagccaacaaaagacccgcccccgatgacgcggataaaagcgagcccaagcgggcctgcccctcagtcgcggatccatcgacgtcagacgcggaaggagctccggtggactttgccgacaggtaccaaaacaaatgttctcgtcacgcgggcatgcttcagatgctgtttccctgcaagacatgcgagagaatgaatcagaatttcaacatttgcttcacgcacgggacgagagactgttcagagtgcttccccggcgtgtcagaatctcaaccggtcgtcagaaagaggacgtatcggaaactctgtgccattcatcatctgctggggcgggctcccgagattgcttgctcggcctgcgatctggtcaacgtggacctggatgactgtgtttctgagcaataaatgacttaaaccaggtatggctgccgatggttatcttccagattggctcgaggacaacctctctgagggcattcgcgagtggtgggacttgaaacctggagccccgaagcccaaagccaaccagcaaaagcaggacgacggccggggtctggtgcttcctggctacaagtacctcggacccttcaacggactcgacaagggggagcccgtcaacgcggcggacgcagcggccctcgagcacgacaaggcctacgaccagcagctcaaagcgggtgacaatccgtaccttcggtataaccacgccgacgccgagtttcaggagcgtctgcaagaagatacgtcttttgggggcaacctcgggcgagcagtcttccaggccaagaagcgggttctcgaacctctcggtctggttgaggaaggcgctaagacggctcctggaaagaaacgtccggtagagcagtcgccacaagagccagactcctcctcgggcatcggcaagacaggccagcagcccgctaaaaagagactcaattttggtcagactggcgactcagagtcagtccccgacccacaacctctcggagaacctccagcaacccccgctgctgtgggacctactacaatggcttcaggcggtggcgcaccaatggcagacaataacgaaggcgccgacggagtgggtaatgcctcaggaaattggcattgcgattccacatggctgggcgacagagtcatcaccaccagcacccgcacctgggccttgcccacctacaataaccacctctacaagcaaatctccagtgcttcaacgggggccagcaacgacaaccactacttcggctacagcaccccctgggggtattttgatttcaacagattccactgccacttttcaccacgtgactggcagcgactcatcaacaacaattggggattccggcccaagagactcaacttcaaactcttcaacatccaagtcaaggaggtcacgacgaatgatggcgtcacaaccatcgctaataaccttaccagcacggttcaagtcttctcggactcggagtaccagcttccgtacgtcctcggctctgcgcaccagggctgcctccctccgttcccggcggacgtgttcatgattccgcaatacggctacctgacgctcaacaatggcagccaagccgtgggacgttcatccttttactgcctggaatatttcccttctcagatgctgagaacgggcaacaactttaccttcagctacacctttgaggaagtgcctttccacagcagctacgcgcacagccagagcctggaccggctgatgaatcctctcatcgaccaatacctgtattacctgaacagaactcaaaatcagtccggaagtgcccaaaacaaggacttgctgtttagccgtgggtctccagctggcatgtctgttcagcccaaaaactggctacctggaccctgttatcggcagcagcgcgtttctaaaacaaaaacagacaacaacaacagcaattttacctggactggtgcttcaaaatataacctcaatgggcgtgaatccatcatcaaccctggcactgctatggcctcacacaaagacgacgaagacaagttctttcccatgagcggtgtcatgatttttggaaaagagagcgccggagcttcaaacactgcattggacaatgtcatgattacagacgaagaggaaattaaagccactaaccctgtggccaccgaaagatttgggaccgtggcagtcaatttccagagcagcagcacagaccctgcgaccggagatgtgcatgctatgggagcattacctggcatggtgtggcaagatagagacgtgtacctgcagggtcccatttgggccaaaattcctcacacagatggacactttcacccgtctcctcttatgggcggctttggactcaagaacccgcctcctcagatcctcatcaaaaacacgcctgttcctgcgaatcctccggcggagttttcagctacaaagtttgcttcattcatcacccaatactccacaggacaagtgagtgtggaaattgaatgggagctgcagaaagaaaacagcaagcgctggaatcccgaagtgcagtacacatccaattatgcaaaatctgccaacgttgattttactgtggacaacaatggactttatactgagcctcgccccattggcacccgttaccttacccgtcccctgtaatctctagagtcgacactagtgcggatccacgggtggcatccctgtgacccctccccagtgcctctcctggccctggaagttgccactccagtgcccaccagccttgtcctaataaaattaagttgcatcattttgtctgactaggtgtccttctataatattatggggtggaggggggtggtatggagcaaggggcaagttgggaagacaacctgtagggcctgcggggtctattgggaaccaagctggagtgcagtggcacaatcttggctcactgcaatctccgcctcctgggttcaagcgattctcctgcctcagcctcccgagttgttgggattccaggcatgcatgaccaggctcagctaatttttgtttttttggtagagacggggtttcaccatattggccaggctggtctccaactcctaatctcaggtgatctacccaccttggcctcccaaattgctgggattacaggcgtgaaccactgctcccttccctgtccttatcgatagatctggcctgattggccggaggggtggagtcgtgacgtgaattacgtcatagggttagggaggtcctgtattagaggtcacgtgagtgttttgcgacattttgcgacaccatgtggtcacgctgggtatttaagcccgagtgagcacgcagggtctccattttgaagcgggaggtttgaacgcgcagccgccatgccggggttttacgagattgtgattaaggtccccagcgaccttgacgagcatctgcccggcatttctgacagctttgtgaactgggtggccgagaaggaatgggagttgccgccagattctgacatggatctgaatctgattgagcaggcacccctgaccgtggccgagaagctgcagcgcgactttctgacggaatggcgccgtgtgagtaaggctccggaggcccttttctttgtgcaatttgagaagggagagagctacttccacatgcacgtgctcgtggaaaccaccggggtgaaatccatggttttgggacgtttcctgagtcagattcgcgaaaaactgattcagagaatttaccgcgggatcgagccgactttgccaaactggttcgcggtcacaaagaccagaaatggcgccggaggcgggaacaaggtggtggatgagtgctacatccccaattacttgctccccaaaacccagcctgagctccagtgggcgtggactaatatggaacagtatttaagcgcctgtttgaatctcacggagcgtaaacggttggtggcgcagcatctgacgcacgtgtcgcagacgcaggagcagaacaaagagaatcagaatcccaattctgatgcgccggtgatcagatcaaaaacttcagccaggtacatggagctggtcgggtggctcgtggacaaggggattacctcggagaagcagtggatccaggaggaccaggcctcatacatctccttcaatgcggcctccaactcgcggtcccaaatcaaggctgccttggacaatgcgggaaagattatgagcctgactaaaaccgcccccgactacctggtgggccagcagcccgtggaggacatttccagcaatcggatttataaaattttggaactaaacgggtacgatccccaatatgcggcttccgtctttctgggatgggccacgaaaaagttcggcaagaggaacaccatctggctgtttgggcctgcaactaccgggaagaccaacatcgcggaggccatagcccacactgtgcccttctacgggtgcgtaaactggaccaatgagaactttcccttcaacgactgtgtcgacaagatggtgatctggtgggaggaggggaagatgaccgccaaggtcgtggagtcggccaaagccattctcggaggaagcaaggtgcgcgtggaccagaaatgcaagtcctcggcccagatagacccgactcccgtgatcgtcacctccaacaccaacatgtgcgccgtgattgacgggaactcaacgaccttcgaacaccagcagccgttgcaagaccggatgttcaaatttgaactcacccgccgtctggatcatgactttgggaaggtcaccaagcaggaagtcaaagactttttccggtgggcaaaggatcacgtggttgaggtggagcatgaattctacgtcaaaaagggtggagccaagaaaagacccgcccccagtgacgcagatataagtgagcccaaacgggtgcgcgagtcagttgcgcagccatcgacgtcagacgcggaagcttcgatcaactacgcagacaggtaccaaaacaaatgttctcgtcacgtgggcatgaatctgatgctgtttccctgcagacaatgcgagagaatgaatcagaattcaaatatctgcttcactcacggacagaaagactgtttagagtgctttcccgtgtcagaatctcaacccgtttctgtcgtcaaaaaggcgtatcagaaactgtgctacattcatcatatcatgggaaaggtgccagacgcttgcactgcctgcgatctggtcaatgtggatttggatgactgcatctttgaacaataaatgatttaaatcaggtatggctgccgatggttatcttccagattggctcgaggacaacctctctaaaataaaaagacagaataaacctattggttaaaaaatgagctgatttaacggccttcttggccgcccttcccggtcgatatgaacagcttatttacataattcacgttattggtagttataaatgaaattcctaatatcggttatgaagtgaaattgaatttctacttgatctttctctctatttttgtaaaataaaattaagaatatttaaatattcaatgattcatttttgcagaaatcggaggaagaagaatatatgaaaacatttaacatttctcaacaagatccccccatattgttgtataagtgatgaaatactgaatttaaaacttagtttatatgtggtaaaatgttttaatcaagtttaggaggaattaattatgaagtgtaatgaataatgaatgtaacagggttcaattaaaagagggaagcgtatcattaaccctataaactacgtctgccctcattattggagggtgaaatgtgaatacatcctattcacaatcgaatttacgacacaaccaaattttaatttggctttgcattttatctttttttagcgtattaaatgaaatggttttgaacgtctcattacctgatattgcaaatgattttaataaaccaccagcgagtacaaactgggtgaacacagcctttatgttaaccttttccattggaacagctgtatatggaaagctatctgatcaattaggcatcaaaaggttactcctatttggaattataataaattgtttcgggtcggtaattgggtttgttggccattctttcttttccttacttattatggctcgttttattcaaggggctggtgcagctgcatttccagcactcgtaatggttgtagttgcgcgctatattccaaaggaaaataggggtaaagcatttggtcttattggatcgatagtagccatgggagaaggagtcggtccagcgattggtggaatgatagcccattatattcattggtcctatcttctactcattcctatgataacaattatcactgttccgtttcttatgaaattattaaagaaagaagtaaggataaaaggtcattttgatatcaaaggaattatactaatgtctgtaggcattgtattttttatgttgtttacaacatcatatagcatttcttttcttatcgttagcgtgctgtcattcctgatatttgtaaaacatatcaggaaagtaacagatccttttgttgatcccggattagggaaaaatataccttttatgattggagttctttgtgggggaattatatttggaacagtagcagggtttgtctctatggttccttatatgatgaaagatgttcaccagctaagtactgccgaaatcggaagtgtaattattttccctggaacaatgagtgtcattattttcggctacattggtgggatacttgttgatagaagaggtcctttatacgtgttaaacatcggagttacatttctttctgttagctttttaactgcttcctttcttttagaaacaacatcatggttcatgacaattataatcgtatttgttttaggtgggctttcgttcaccaaaacagttatatcaacaattgtttcaagtagcttgaaacagcaggaagctggtgctggaatgagtttgcttaactttaccagctttttatcagagggaacaggtattgcaattgtaggtggtttattatccatacccttacttgatcaaaggttgttacctatggaagttgatcagtcaacttatctgtatagtaatttgttattacttttttcaggaatcattgtcattagttggctggttaccttgaatgtatataaacattctcaaagggatttctaaatcgttaagggatcaactttgggagagagttcaaaattgatcctttttttataacaggaattgggcatcaaataaaacgaaaggctcagtcgaaagactgggcctttcgttttatctgttgtttgtcggtgaacgctctcctgagtaggacaaatccgccgggagcggatttgaacgttgcgaagcaacggcccggagggtggcgggcaggacgcccgccataaactgccaggcatcaaattaagcagaaggccatcctgacggatggcctttttgcgtttctacaaactcttcctgtcgtcatatctacaattctacacagcccagtccagactattgaattgtatcacgtttttgatatcctaccaataacaaattgattggaggaatgcaaagtgaataatgaaccagtaaaacgtggtaagaagaacagatgggaattaaacctacctataatgacttatgtagtagctgatgattggattgataaactaggacacgaaacgtttactttatggttgaggttccatacttgggtagatagagaagatgaactccgagattatgatcgcatacctagaagttttgagaacatatataaaaagacactaggaatctcaaaaagtaagttttatagattgataaaacctttatgggaatatggattaatagacatcatagaatacgaagaatctaaccgtaattctactaaacctaaaaatataattgtttatgagtatcctttacacgaaatagaaagaaagtataaaccactagaaaaattaagagattgggataaagactataattccgtttctaaagaattaggtaaaacaggtggtagaccaaggaaaaaagatagtgaagaagaacccgaaaagaaacccgaagaagtaactaaaaagaaacgtaaatataagttaaaaagagttatccacaacggtttcaaaaatgaaacggtggagggtttcaaaaatgaaacggtggagggtttcaaaaatgaaacggtgaccgtttcaaaaataaaacccaataattattcaaatatctttaataacttatcaaatatttctactaatgtttcaaataatttattaattgatgatgatgaggaaatcgaaaatgaaccaactggtcgtacaataaataggtcattacttttttcacaagaagatattaaacaggcctatcaatttattaatagattttcagttatacagttacgtgaaaactttagctttgataaacactttgaagaacggttggtatgttatttatggaaagcagggatttctactttttacacgcacgaaatcagtaaaatgataaaaaaaatagcagactatgaaaaatctaaaaaaggtagattaaacccaatacgtgaccgagccttatatatggtaaatggtcttgtaatgaatagagcttcttcccaaagtgaacatgctacttataaactaaaccaatataaaaaacagaaggaacaggaaaaacaacaacaggagcaacaaagatcaagagtaccgttctataattggttggaggaaagagaagaacaaaccgaaggtcaactacccaccacttaagcggccgcaagcttgaagagctcttctttcagaacgctcggttgccgccgggcgttttttatgagacgtctcattatactggcttaactatgcggcatcagagcagattgtactgagagtgcaccatatgcggtgtgaaataccgcacagatgcgtaaggagaaaataccgcatcaggcgctcttccgcttcctcgctcactgactcgctgcgctcggtcgttcggctgcggcgagcggtatcagctcactcaaaggcggtaatacggttatccacagaatcaggggataacgcaggaaagaacatgtgagcaaaaggccagcaaaaggccaggaaccgtaaaaaggccgcgttgctggcgtttttccataggctccgcccccctgacgagcatcacaaaaatcgacgctcaagtcagaggtggcgaaacccgacaggactataaagataccaggcgtttccccctggaagctccctcgtgcgctctcctgttccgaccctgccgcttaccggatacctgtccgcctttctcccttcgggaagcgtggcgctttctcatagctcacgctgtaggtatctcagttcggtgtaggtcgttcgctccaagctgggctgtgtgcacgaaccccccgttcagcccgaccgctgcgccttatccggtaactatcgtcttgagtccaacccggtaagacacgacttatcgccactggcagcagccactggtaacaggattagcagagcgaggtatgtaggcggtgctacagagttcttgaagtggtggcctaactacggctacactagaaggacagtatttggtatctgcgctctgctgaagccagttaccttcggaaaaagagttggtagctcttgatccggcaaacaaaccaccgctggtagcggtggtttttttgtttgcaagcagcagattacgcgcagaaaaaaaggatctcaagaagatcctttgatcttttctacggggtctgacgctcagtggaacgaaaactcacgttaagggattttggtcatgagattatcaaaaaggatcttcacctagatccttttaaattaaaaatgaagttttaaatcaatctaaagtatatatgagtaaacttggtctgacagttaccaatgcttaatcagtgaggcacctatctcagcgatctgtctatttcgttcatccatagttgcctgactccccgtcgtgtagataactacgatacgggagggcttaccatctggccccagtgctgcaatgataccgcgagacccacgctcaccggctccagatttatcagcaataaaccagccagccggaagggccgagcgcagaagtggtcctgcaactttatccgcctccatccagtctattaattgttgccgggaagctagagtaagtagttcgccagttaatagtttgcgcaacgttgttgccattgctgcaggcatcgtggtgtcacgctcgtcgtttggtatggcttcattcagctccggttcccaacgatcaaggcgagttacatgatcccccatgttgtgcaaaaaagcggttagctccttcggtcctccgatcgttgtcagaagtaagttggccgcagtgttatcactcatggttatggcagcactgcataattctcttactgtcatgccatccgtaagatgcttttctgtgactggtgagtactcaaccaagtcattctgagaatagtgtatgcggcgaccgagttgctcttgcccggcgtcaacacgggataataccgcgccacatagcagaactttaaaagtgctcatcattggaaaacgttcttcggggcgaaaactctcaaggatcttaccgctgttgagatccagttcgatgtaacccactcgtgcacccaactgatcttcagcatcttttactttcaccagcgtttctgggtgagcaaaaacaggaaggcaaaatgccgcaaaaaagggaataagggcgacacggaaatgttgaatactcatactcttcctttttcaatattattgaagcatttatcagggttattgtctcatgagcggatacatatttgaatgtatttagaaaaataaacaaataggggttccgcgcacatttccccgaaaagtgccacctgacgtctaagaaaccattattatcatgacattaacctataaaaataggcgtatcacgaggccctttcgtcttcaagaattctcatgtttgacagcttatcatcgataagcttgggcctgtttggcc

SEQ ID NO: 243 - DNA, 17388 bp, synthetic construct
  misc_feature 1..17388: note = Seed plasmid #15
  source 1..17388: mol_type = other DNA
ggcctgtttggccacgcggtaggaggaggggagggtgccctgcatgtctgccgctgctcttgctcttgccgctgctgaggaggggggcgcatctgccgcagcaccggatgcatctgggaaaagcaaaaaaggggctcgtccctgtttccggaggaatttgcaagcggggtcttgcatgacggggaggcaaacccccgttcgccgcagtccggccggtccgagactcgaaccgggggtcccgcgactcaacccttggaaaataaccctccggctacagggagcgagccacttaatgctttcgctttccagcctaaccgcttacgctgcgcgcggccagtggccaaaaaagctagcgcagcagccgccgcgcctggaaggaagccaaaaggagcactcccccgttgtctgacgtcgcacacctgggttcgacacgcgggcggtaaccgcatggatcacggcggacggccggatacggggctcgaaccccggtcgtccgccatgatacccttgcgaatttatccaccagaccacggaagagtgcccgcttacaggctctccttttgcacggtctagagcgtcaacgattgcgcgcgcctgaccggccagagcgtcccgaccatggagcactttttgccgctgcgcaacatctggaaccgcgtccgcgactttccgcgcgcctccaccaccgccgccggcatcacctggatgtccaggtacatctaccaattgacatgtgagcaaaaggccagcaaaaggccaggaaccgtaaaaaggccgcgttgctggcgttggccttgatggccccgggtgtggccgctggagatgacgtagttttcgcgcttaaatttgagaaagggcgcgaaactagtccttaagagtcagcgcgcagtatttactgaagagagcctccgcgtcttccagcgtgcgccgaagctgatcttcgcttttgtgatacaggcagctgcggatggccagtcgggaagaggagcagcgcgaaaccacccccgagcgcggacgcggtgcggcgcgacgtcccccaaccatggaggacgtgtcgtccccgtccccgtcgccgccgcctccccgggcgcccccaaaaaagcggatgaggcggcgtatcgagtccgaggacgaggaagactcatcacaagacgcgctggtgccgcgcacacccagcccgcggccatcgacctcggcggcggatttggccattgcgcccaagaagaaaaagaagcgcccttctcccaagcccgagcgcccgccatcaccagaggtaatcgtggacagcgaggaagaaagagaagatgtggcgctacaaatggtgggtttcagcaacccaccggtgctaatcaagcatggcaaaggaggtaagcgcacagtgcggcggctgaatgaagacgacccagtggcgcgtggtatgcggacgcaagaggaagaggaagagcccagcgaagcggaaagtgaaattacggtgatgaacccgctgagtgtgccgatcgtgtctgcgtgggagaagggcatggaggctgcgcgcgcgctgatggacaagtaccacgtggataacgatctaaaggcgaacttcaaactactgcctgaccaagtggaagctctggcggccgtatgcaagacctggctgaacgaggagcaccgcgggttgcagctgaccttcaccagcaacaagacctttgtgacgatgatggggcgattcctgcaggcgtacctgcagtcgtttgcagaggtgacctacaagcatcacgagcccacgggctgcgcgttgtggctgcaccgctgcgctgagatcgaaggcgagcttaagtgtctacacggaagcattatgataaataaggagcacgtgattgaaatggatgtgacgagcgaaaacgggcagcgcgcgctgaaggagcagtctagcaaggccaagatcgtgaagaaccggtggggccgaaatgtggtgcagatctccaacaccgacgcaaggtgctgcgtgcacgacgcggcctgtcctgccaatcagttttccggcaagtcttgcggcatgttcttctctgaaggcgcaaaggctcaggtggcttttaagcagatcaaggcttttatgcaggcgctgtatcctaacgcccagaccgggcacggtcaccttttgatgccactacggtgcgagtgcaactcaaagcctgggcacgcgccctttttgggaaggcagctaccaaagttgactccgttcgccctgagcaacgcggaggacctggacgcggatctgatctccgacaagagcgtgctggccagcgtgcaccacccggcgctgatagtgttccagtgctgcaaccctgtgtatcgcaactcgcgcgcgcagggcggaggccccaactgcgacttcaagatatcggcgcccgacctgctaaacgcgttggtgatggtgcgcagcctgtggagtgaaaacttcaccgagctgccgcggatggttgtgcctgagtttaagtggagcactaaacaccagtatcgcaacgtgtccctgccagtggcgcatagcgatgcgcggcagaacccctttgatttttaagatggccggccgcttcgagcagacatgataagatacattgatgagtttggacaaaccacaactagaatgcagtgaaaaaaatgctttatttgtgaaatttgtgatgctattgctttatttgtaaccattataagctgcaataaacaagttaacaacaacaattgcattcattttatgtttcaggttcagggggaggtgtgggaggttttttaaagcaagtaaaacctctacaaatgtggtagcggccgcggcgctcttccgcttcctcgctcactgactcgctgcgctcggtcgttcggctgcggcgagcggtatcagctcactcaaaggcggtaatacggttatccacagaatcaggggataacgcaggaaagaacatgtgagcaaaaggccagcaaaaggccaggaaccgtaaaaaggccgcgttgctggcgttggcctacttggccggctccggtgcccgtcagtgggcagagcgcacatcgcccacagtccccgagaagttggggggaggggtcggcaattgaaccggtgcctagagaaggtggcgcggggtaaactgggaaagtgatgtcgtgtactggctccgcctttttcccgagggtgggggagaaccgtatataagtgcagtagtcgccgtgaacgttctttttcgcaacgggtttgccgccagaacacaggtaagtgccgtgtgtggttcccgcgggcctggcctctttacgggttatggcccttgcgtgccttgaattacttccacctggctgcagtacgtgattcttgatcccgagcttcgggttggaagtgggtgggagagttcgaggccttgcgcttaaggagccccttcgcctcgtgcttgagttgaggcctggcctgggcgctggggccgccgcgtgcgaatctggtggcaccttcgcgcctgtctcgctgctttcgataagtctctagccatttaaaatttttgatgacctgctgcgacgctttttttctggcaagatagtcttgtaaatgcgggccaagatctgcacactggtatttcggtttttggggccgcgggcggcgacggggcccgtgcgtcccagcgcacatgttcggcgaggcggggcctgcgagcgcggccaccgagaatcggacgggggtagtctcaagctggccggcctgctctggtgcctggtctcgcgccgccgtgtatcgccccgccctgggcggcaaggctggcccggtcggcaccagttgcgtgagcggaaagatggccgcttcccggccctgctgcagggagctcaaaatggaggacgcggcgctcgggagagcgggcgggtgagtcacccacacaaaggaaaagggcctttccgtcctcagccgtcgcttcatgtgactccacggagtaccgggcgccgtccaggcacctcgattagttctcgagcttttggagtacgtcgtctttaggttggggggaggggttttatgcgatggagtttccccacactgagtgggtggagactgaagttaggccagcttggcacttgatgtaattctccttggaatttgccctttttgagtttggatcttggttcattctcaagcctcagacagtggttcaaagtttttttcttccatttcaggtgtcgtgagccaccatgactacgtccggcgttccatttggcatgacactacgaccaacacgatctcggttgtctcggcgcactccgtacagtagggatcgtctacctccttttgagacagaaacccgcgctaccatactggaggatcatccgctgctgcccgaatgtaacactttgacaatgcacaacgtgagttacgtgcgaggtcttccctgcagtgtgggatttacgctgattcaggaatgggttgttccctgggatatggttctaacgcgggaggagcttgtaatcctgaggaagtgtatgcacgtgtgcctgtgttgtgccaacattgatatcatgacgagcatgatgatccatggttacgagtcctgggctctccactgtcattgttccagtcccggttccctgcagtgtatagccggcgggcaggttttggccagctggtttaggatggtggtggatggcgccatgtttaatcagaggtttatatggtaccgggaggtggtgaattacaacatgccaaaagaggtaatgtttatgtccagcgtgtttatgaggggtcgccacttaatctacctgcgcttgtggtatgatggccacgtgggttctgtggtccccgccatgagctttggatacagcgccttgcactgtgggattttgaacaatattgtggtgctgtgctgcagttactgtgctgatttaagtgagatcagggtgcgctgctgtgcccggaggacaaggcgccttatgctgcgggcggtgcgaatcatcgctgaggagaccactgccatgttgtattcctgcaggacggagcggcggcggcagcagtttattcgcgcgctgctgcagcaccaccgccctatcctgatgcacgattatgactctacccccatgtaagaattcctagagctcgctgatcagcctcgactgtgccttctagttgccagccatctgttgtttgcccctcccccgtgccttccttgaccctggaaggtgccactcccactgtcctttcctaataaaatgaggaaattgcatcgcattgtctgagtaggtgtcattctattctggggggtggggtggggcaggacagcaagggggaggattgggaagagaatagcaggcatgctggggaggccttgttggccttctaccgggtaggggaggcgcttttcccaaggcagtctggagcatgcgctttagcagccccgctgggcacttggcgctacacaagtggcctctggcctcgcacacattccacatccaccggtaggcgccaaccggctccgttctttggtggccccttcgcgccaccttctactcctcccctagtcaggaagttcccccccgccccgcagctcgcgtcgtgcaggacgtgacaaatggaagtagcacgtctcactagtctcgtgcagatggacagcaccgctgagcaatggaagcgggtaggcctttggggcagcggccaatagcagctttgctccttcgctttctgggctcagaggctgggaaggggtgggtccgggggcgggctcaggggcgggctcaggggcggggcgggcgcccgaaggtcctccggaggcccggcattctgcacgcttcaaaagcgcacgtctgccgcgctgttctcctcttcctcatctccgggcctttcgacctgccaccatggctgccgatggttatcttccagattggctcgaggacaacctctctgagggcattcgcgagtggtgggacttgaaacctggagccccgaagcccaaagccaaccagcaaaagcaggacgacggccggggtctggtgcttcctggctacaagtacctcggacccttcaacggactcgacaagggggagcccgtcaacgcggcggacgcagcggccctcgagcacgacaaggcctacgaccagcagctcaaagcgggtgacaatccgtaccttcggtataaccacgccgacgccgagtttcaggagcgtctgcaagaagatacgtcttttgggggcaacctcgggcgagcagtcttccaggccaagaagcgggttctcgaacctctcggtctggttgaggaaggcgctaagacggctcctggaaagaaacgtccggtagagcagtcgccacaagagccagactcctcctcgggcatcggcaagacaggccagcagcccgctaaaaagagactcaattttggtcagactggcgactcagagtcagtccccgacccacaacctctcggagaacctccagcaacccccgctgctgtgggacctactacaatggcttcaggcggtggcgcaccaatggcagacaataacgaaggcgccgacggagtgggtaatgcctcaggaaattggcattgcgattccacatggctgggcgacagagtcatcaccaccagcacccgcacctgggccttgcccacctacaataaccacctctacaagcaaatctccagtgcttcaacgggggccagcaacgacaaccactacttcggctacagcaccccctgggggtattttgatttcaacagattccactgccacttttcaccacgtgactggcagcgactcatcaacaacaattggggattccggcccaagagactcaacttcaaactcttcaacatccaagtcaaggaggtcacgacgaatgatggcgtcacaaccatcgctaataaccttaccagcacggttcaagtcttctcggactcggagtaccagcttccgtacgtcctcggctctgcgcaccagggctgcctccctccgttcccggcggacgtgttcatgattccgcaatacggctacctgacgctcaacaatggcagccaagccgtgggacgttcatccttttactgcctggaatatttcccttctcagatgctgagaacgggcaacaactttaccttcagctacacctttgaggaagtgcctttccacagcagctacgcgcacagccagagcctggaccggctgatgaatcctctcatcgaccaatacctgtattacctgaacagaactcaaaatcagtccggaagtgcccaaaacaaggacttgctgtttagccgtgggtctccagctggcatgtctgttcagcccaaaaactggctacctggaccctgttatcggcagcagcgcgtttctaaaacaaaaacagacaacaacaacagcaattttacctggactggtgcttcaaaatataacctcaatgggcgtgaatccatcatcaaccctggcactgctatggcctcacacaaagacgacgaagacaagttctttcccatgagcggtgtcatgatttttggaaaagagagcgccggagcttcaaacactgcattggacaatgtcatgattacagacgaagaggaaattaaagccactaaccctgtggccaccgaaagatttgggaccgtggcagtcaatttccagagcagcagcacagaccctgcgaccggagatgtgcatgctatgggagcattacctggcatggtgtggcaagatagagacgtgtacctgcagggtcccatttgggccaaaattcctcacacagatggacactttcacccgtctcctcttatgggcggctttggactcaagaacccgcctcctcagatcctcatcaaaaacacgcctgttcctgcgaatcctccggcggagttttcagctacaaagtttgcttcattcatcacccaatactccacaggacaagtgagtgtggaaattgaatgggagctgcagaaagaaaacagcaagcgctggaatcccgaagtgcagtacacatccaattatgcaaaatctgccaacgttgattttactgtggacaacaatggactttatactgagcctcgccccattggcacccgttaccttacccgtcccctgtaatctctagagtcgacactagtgcggatccacgggtggcatccctgtgacccctccccagtgcctctcctggccctggaagttgccactccagtgcccaccagccttgtcctaataaaattaagttgcatcattttgtctgactaggtgtccttctataatattatggggtggaggggggtggtatggagcaaggggcaagttgggaagacaacctgtagggcctgcggggtctattgggaaccaagctggagtgcagtggcacaatcttggctcactgcaatctccgcctcctgggttcaagcgattctcctgcctcagcctcccgagttgttgggattccaggcatgcatgaccaggctcagctaatttttgtttttttggtagagacggggtttcaccatattggccaggctggtctccaactcctaatctcaggtgatctacccaccttggcctcccaaattgctgggattacaggcgtgaaccactgctcccttccctgtccttatcgatagatctggcctgattggccggtgcagcggcctccgcgccgggttttggcgcctcccgcgggcgcccccctcctcacggcgagcgctgccacgtcagacgaagggcgcagcgagcgtcctgatccttccgcccggacgctcaggacagcggcccgctgctcataagactcggccttagaaccccagtatcagcagaaggacattttaggacgggacttgggtgactctagggcactggttttctttccagagagcggaacaggcgaggaaaagtagtcccttctcggcgattctgcggagggatctccgtggggcggtgaacgccgatgattatataaggacgcgccgggtgtggcacagctagttccgtcgcagccgggatttgggtcgcggttcttgtttgtggatcgctgtgatcgtcacttggtgagtagcgggctgctgggctggccggggctttcgtggccgccgggccgctcggtgggacggaagcgtgtggagagaccgccaagggctgtagtctgggtccgcgagcaaggttgccctgaactgggggttggggggagcgcagcaaaatggcggctgttcccgagtcttgaatggaagacgcttgtgaggcgggctgtgaggtcgttgaaacaaggtggggggcatggtgggcggcaagaacccaaggtcttgaggccttcgctaatgcgggaaagctcttattcgggtgagatgggctggggcaccatctggggaccctgacgtgaagtttgtcactgactggagaactcggtttgtcgtctgttgcgggggcggcagttatggcggtgccgttgggcagtgcacccgtacctttgggagcgcgcgccctcgtcgtgtcgtgacgtcacccgttctgttggcttataatgcagggtggggccacctgccggtaggtgtgcggtaggcttttctccgtcgcaggacgcagggttcgggcctagggtaggctctcctgaatcgacaggcgccggacctctggtgaggggagggataagtgaggcgtcagtttctttggtcggttttatgtacctatcttcttaagtagctgaagctccggttttgaactatgcgctcggggttggcgagtgtgttttgtgaagttttttaggcaccttttgaaatgtaatcatttgggtcaatatgtaattttcagtgttagactagtaaagccaccatgccggggttttacgagattgtgattaaggtccccagcgaccttgacgagcatctgcccggcatttctgacagctttgtgaactgggtggccgagaaggaatgggagttgccgccagattctgacatggatctgaatctgattgagcaggcacccctgaccgtggccgagaagctgcagcgcgactttctgacggaatggcgccgtgtgagtaaggctccggaggcccttttctttgtgcaatttgagaagggagagagctacttccacatgcacgtgctcgtggaaaccaccggggtgaaatccatggttttgggacgtttcctgagtcagattcgcgaaaaactgattcagagaatttaccgcgggatcgagccgactttgccaaactggttcgcggtcacaaagaccagaaatggcgccggaggcgggaacaaggtggtggatgagtgctacatccccaattacttgctccccaaaacccagcctgagctccagtgggcgtggactaatatggaacagtatttaagcgcctgtttgaatctcacggagcgtaaacggttggtggcgcagcatctgacgcacgtgtcgcagacgcaggagcagaacaaagagaatcagaatcccaattctgatgcgccggtgatcagatcaaaaacttcagccaggtacatggagctggtcgggtggctcgtggacaaggggattacctcggagaagcagtggatccaggaggaccaggcctcatacatctccttcaatgcggcctccaactcgcggtcccaaatcaaggctgccttggacaatgcgggaaagattatgagcctgactaaaaccgcccccgactacctggtgggccagcagcccgtggaggacatttccagcaatcggatttataaaattttggaactaaacgggtacgatccccaatatgcggcttccgtctttctgggatgggccacgaaaaagttcggcaagaggaacaccatctggctgtttgggcctgcaactaccgggaagaccaacatcgcggaggccatagcccacactgtgcccttctacgggtgcgtaaactggaccaatgagaactttcccttcaacgactgtgtcgacaagatggtgatctggtgggaggaggggaagatgaccgccaaggtcgtggagtcggccaaagccattctcggaggaagcaaggtgcgcgtggaccagaaatgcaagtcctcggcccagatagacccgactcccgtgatcgtcacctccaacaccaacatgtgcgccgtgattgacgggaactcaacgaccttcgaacaccagcagccgttgcaagaccggatgttcaaatttgaactcacccgccgtctggatcatgactttgggaaggtcaccaagcaggaagtcaaagactttttccggtgggcaaaggatcacgtggttgaggtggagcatgaattctacgtcaaaaagggtggagccaagaaaagacccgcccccagtgacgcagatataagtgagcccaaacgggtgcgcgagtcagttgcgcagccatcgacgtcagacgcggaagcttcgatcaactacgcagacaggtaccaaaacaaatgttctcgtcacgtgggcatgaatctgatgctgtttccctgcagacaatgcgagagaatgaatcagaattcaaatatctgcttcactcacggacagaaagactgtttagagtgctttcccgtgtcagaatctcaacccgtttctgtcgtcaaaaaggcgtatcagaaactgtgctacattcatcatatcatgggaaaggtgccagacgcttgcactgcctgcgatctggtcaatgtggatttggatgactgcatctttgaacaataaatgatttaaatcaggtatggctgccgatggttatcttccagattggctcgaggacaacctctctaaaataaaaagacagaataaacctattggttaaaaaatgagctgatttaacggccttcttggccgcccttcccggtcgatatgaacagcttatttacataattcacgttattggtagttataaatgaaattcctaatatcggttatgaagtgaaattgaatttctacttgatctttctctctatttttgtaaaataaaattaagaatatttaaatattcaatgattcatttttgcagaaatcggaggaagaagaatatatgaaaacatttaacatttctcaacaagatccccccatattgttgtataagtgatgaaatactgaatttaaaacttagtttatatgtggtaaaatgttttaatcaagtttaggaggaattaattatgaagtgtaatgaataatgaatgtaacagggttcaattaaaagagggaagcgtatcattaaccctataaactacgtctgccctcattattggagggtgaaatgtgaatacatcctattcacaatcgaatttacgacacaaccaaattttaatttggctttgcattttatctttttttagcgtattaaatgaaatggttttgaacgtctcattacctgatattgcaaatgattttaataaaccaccagcgagtacaaactgggtgaacacagcctttatgttaaccttttccattggaacagctgtatatggaaagctatctgatcaattaggcatcaaaaggttactcctatttggaattataataaattgtttcgggtcggtaattgggtttgttggccattctttcttttccttacttattatggctcgttttattcaaggggctggtgcagctgcatttccagcactcgtaatggttgtagttgcgcgctatattccaaaggaaaataggggtaaagcatttggtcttattggatcgatagtagccatgggagaaggagtcggtccagcgattggtggaatgatagcccattatattcattggtcctatcttctactcattcctatgataacaattatcactgttccgtttcttatgaaattattaaagaaagaagtaaggataaaaggtcattttgatatcaaaggaattatactaatgtctgtaggcattgtattttttatgttgtttacaacatcatatagcatttcttttcttatcgttagcgtgctgtcattcctgatatttgtaaaacatatcaggaaagtaacagatccttttgttgatcccggattagggaaaaatataccttttatgattggagttctttgtgggggaattatatttggaacagtagcagggtttgtctctatggttccttatatgatgaaagatgttcaccagctaagtactgccgaaatcggaagtgtaattattttccctggaacaatgagtgtcattattttcggctacattggtgggatacttgttgatagaagaggtcctttatacgtgttaaacatcggagttacatttctttctgttagctttttaactgcttcctttcttttagaaacaacatcatggttcatgacaattataatcgtatttgttttaggtgggctttcgttcaccaaaacagttatatcaacaattgtttcaagtagcttgaaacagcaggaagctggtgctggaatgagtttgcttaactttaccagctttttatcagagggaacaggtattgcaattgtaggtggtttattatccatacccttacttgatcaaaggttgttacctatggaagttgatcagtcaacttatctgtatagtaatttgttattacttttttcaggaatcattgtcattagttggctggttaccttgaatgtatataaacattctcaaagggatttctaaatcgttaagggatcaactttgggagagagttcaaaattgatcctttttttataacaggaattgggcatcaaataaaacgaaaggctcagtcgaaagactgggcctttcgttttatctgttgtttgtcggtgaacgctctcctgagtaggacaaatccgccgggagcggatttgaacgttgcgaagcaacggcccggagggtggcgggcaggacgcccgccataaactgccaggcatcaaattaagcagaaggccatcctgacggatggcctttttgcgtttctacaaactcttcctgtcgtcatatctacaattctacacagcccagtccagactattgaattgtatcacgtttttgatatcctaccaataacaaattgattggaggaatgcaaagtgaataatgaaccagtaaaacgtggtaagaagaacagatgggaattaaacctacctataatgacttatgtagtagctgatgattggattgataaactaggacacgaaacgtttactttatggttgaggttccatacttgggtagatagagaagatgaactccgagattatgatcgcatacctagaagttttgagaacatatataaaaagacactaggaatctcaaaaagtaagttttatagattgataaaacctttatgggaatatggattaatagacatcatagaatacgaagaatctaaccgtaattctactaaacctaaaaatataattgtttatgagtatcctttacacgaaatagaaagaaagtataaaccactagaaaaattaagagattgggataaagactataattccgtttctaaagaattaggtaaaacaggtggtagaccaaggaaaaaagatagtgaagaagaacccgaaaagaaacccgaagaagtaactaaaaagaaacgtaaatataagttaaaaagagttatccacaacggtttcaaaaatgaaacggtggagggtttcaaaaatgaaacggtggagggtttcaaaaatgaaacggtgaccgtttcaaaaataaaacccaataattattcaaatatctttaataacttatcaaatatttctactaatgtttcaaataatttattaattgatgatgatgaggaaatcgaaaatgaaccaactggtcgtacaataaataggtcattacttttttcacaagaagatattaaacaggcctatcaatttattaatagattttcagttatacagttacgtgaaaactttagctttgataaacactttgaagaacggttggtatgttatttatggaaagcagggatttctactttttacacgcacgaaatcagtaaaatgataaaaaaaatagcagactatgaaaaatctaaaaaaggtagattaaacccaatacgtgaccgagccttatatatggtaaatggtcttgtaatgaatagagcttcttcccaaagtgaacatgctacttataaactaaaccaatataaaaaacagaaggaacaggaaaaacaacaacaggagcaacaaagatcaagagtaccgttctataattggttggaggaaagagaagaacaaaccgaaggtcaactacccaccacttaagcggccgcaagcttgaagagctcttctttcagaacgctcggttgccgccgggcgttttttatgagacgtctcattatactggcttaactatgcggcatcagagcagattgtactgagagtgcaccatatgcggtgtgaaataccgcacagatgcgtaaggagaaaataccgcatcaggcgctcttccgcttcctcgctcactgactcgctgcgctcggtcgttcggctgcggcgagcggtatcagctcactcaaaggcggtaatacggttatccacagaatcaggggataacgcaggaaagaacatgtgagcaaaaggccagcaaaaggccaggaaccgtaaaaaggccgcgttgctggcgtttttccataggctccgcccccctgacgagcatcacaaaaatcgacgctcaagtcagaggtggcgaaacccgacaggactataaagataccaggcgtttccccctggaagctccctcgtgcgctctcctgttccgaccctgccgcttaccggatacctgtccgcctttctcccttcgggaagcgtggcgctttctcatagctcacgctgtaggtatctcagttcggtgtaggtcgttcgctccaagctgggctgtgtgcacgaaccccccgttcagcccgaccgctgcgccttatccggtaactatcgtcttgagtccaacccggtaagacacgacttatcgccactggcagcagccactggtaacaggattagcagagcgaggtatgtaggcggtgctacagagttcttgaagtggtggcctaactacggctacactagaaggacagtatttggtatctgcgctctgctgaagccagttaccttcggaaaaagagttggtagctcttgatccggcaaacaaaccaccgctggtagcggtggtttttttgtttgcaagcagcagattacgcgcagaaaaaaaggatctcaagaagatcctttgatcttttctacggggtctgacgctcagtggaacgaaaactcacgttaagggattttggtcatgagattatcaaaaaggatcttcacctagatccttttaaattaaaaatgaagttttaaatcaatctaaagtatatatgagtaaacttggtctgacagttaccaatgcttaatcagtgaggcacctatctcagcgatctgtctatttcgttcatccatagttgcctgactccccgtcgtgtagataactacgatacgggagggcttaccatctggccccagtgctgcaatgataccgcgagacccacgctcaccggctccagatttatcagcaataaaccagccagccggaagggccgagcgcagaagtggtcctgcaactttatccgcctccatccagtctattaattgttgccgggaagctagagtaagtagttcgccagttaatagtttgcgcaacgttgttgccattgctgcaggcatcgtggtgtcacgctcgtcgtttggtatggcttcattcagctccggttcccaacgatcaaggcgagttacatgatcccccatgttgtgcaaaaaagcggttagctccttcggtcctccgatcgttgtcagaagtaagttggccgcagtgttatcactcatggttatggcagcactgcataattctcttactgtcatgccatccgtaagatgcttttctgtgactggtgagtactcaaccaagtcattctgagaatagtgtatgcggcgaccgagttgctcttgcccggcgtcaacacgggataataccgcgccacatagcagaactttaaaagtgctcatcattggaaaacgttcttcggggcgaaaactctcaaggatcttaccgctgttgagatccagttcgatgtaacccactcgtgcacccaactgatcttcagcatcttttactttcaccagcgtttctgggtgagcaaaaacaggaaggcaaaatgccgcaaaaaagggaataagggcgacacggaaatgttgaatactcatactcttcctttttcaatattattgaagcatttatcagggttattgtctcatgagcggatacatatttgaatgtatttagaaaaataaacaaataggggttccgcgcacatttccccgaaaagtgccacctgacgtctaagaaaccattattatcatgacattaacctataaaaataggcgtatcacgaggccctttcgtcttcaagaattctcatgtttgacagcttatcatcgataagcttgggcctgtttggcc

SEQ ID NO: 244 - DNA, 17533 bp, synthetic construct
  misc_feature 1..17533: note = Seed plasmid #16
  source 1..17533: mol_type = other DNA
ggcctgtttggccacgcggtaggaggaggggagggtgccctgcatgtctgccgctgctcttgctcttgccgctgctgaggaggggggcgcatctgccgcagcaccggatgcatctgggaaaagcaaaaaaggggctcgtccctgtttccggaggaatttgcaagcggggtcttgcatgacggggaggcaaacccccgttcgccgcagtccggccggtccgagactcgaaccgggggtcccgcgactcaacccttggaaaataaccctccggctacagggagcgagccacttaatgctttcgctttccagcctaaccgcttacgctgcgcgcggccagtggccaaaaaagctagcgcagcagccgccgcgcctggaaggaagccaaaaggagcactcccccgttgtctgacgtcgcacacctgggttcgacacgcgggcggtaaccgcatggatcacggcggacggccggatacggggctcgaaccccggtcgtccgccatgatacccttgcgaatttatccaccagaccacggaagagtgcccgcttacaggctctccttttgcacggtctagagcgtcaacgattgcgcgcgcctgaccggccagagcgtcccgaccatggagcactttttgccgctgcgcaacatctggaaccgcgtccgcgactttccgcgcgcctccaccaccgccgccggcatcacctggatgtccaggtacatctaccaattgacatgtgagcaaaaggccagcaaaaggccaggaaccgtaaaaaggccgcgttgctggcgttggccttgatggccggtgcagcggcctccgcgccgggttttggcgcctcccgcgggcgcccccctcctcacggcgagcgctgccacgtcagacgaagggcgcagcgagcgtcctgatccttccgcccggacgctcaggacagcggcccgctgctcataagactcggccttagaaccccagtatcagcagaaggacattttaggacgggacttgggtgactctagggcactggttttctttccagagagcggaacaggcgaggaaaagtagtcccttctcggcgattctgcggagggatctccgtggggcggtgaacgccgatgattatataaggacgcgccgggtgtggcacagctagttccgtcgcagccgggatttgggtcgcggttcttgtttgtggatcgctgtgatcgtcacttggtgagtagcgggctgctgggctggccggggctttcgtggccgccgggccgctcggtgggacggaagcgtgtggagagaccgccaagggctgtagtctgggtccgcgagcaaggttgccctgaactgggggttggggggagcgcagcaaaatggcggctgttcccgagtcttgaatggaagacgcttgtgaggcgggctgtgaggtcgttgaaacaaggtggggggcatggtgggcggcaagaacccaaggtcttgaggccttcgctaatgcgggaaagctcttattcgggtgagatgggctggggcaccatctggggaccctgacgtgaagtttgtcactgactggagaactcggtttgtcgtctgttgcgggggcggcagttatggcggtgccgttgggcagtgcacccgtacctttgggagcgcgcgccctcgtcgtgtcgtgacgtcacccgttctgttggcttataatgcagggtggggccacctgccggtaggtgtgcggtaggcttttctccgtcgcaggacgcagggttcgggcctagggtaggctctcctgaatcgacaggcgccggacctctggtgaggggagggataagtgaggcgtcagtttctttggtcggttttatgtacctatcttcttaagtagctgaagctccggttttgaactatgcgctcggggttggcgagtgtgttttgtgaagttttttaggcaccttttgaaatgtaatcatttgggtcaatatgtaattttcagtgttagactagtaaagccaccatggccagtcgggaagaggagcagcgcgaaaccacccccgagcgcggacgcggtgcggcgcgacgtcccccaaccatggaggacgtgtcgtccccgtccccgtcgccgccgcctccccgggcgcccccaaaaaagcggatgaggcggcgtatcgagtccgaggacgaggaagactcatcacaagacgcgctggtgccgcgcacacccagcccgcggccatcgacctcggcggcggatttggccattgcgcccaagaagaaaaagaagcgcccttctcccaagcccgagcgcccgccatcaccagaggtaatcgtggacagcgaggaagaaagagaagatgtggcgctacaaatggtgggtttcagcaacccaccggtgctaatcaagcatggcaaaggaggtaagcgcacagtgcggcggctgaatgaagacgacccagtggcgcgtggtatgcggacgcaagaggaagaggaagagcccagcgaagcggaaagtgaaattacggtgatgaacccgctgagtgtgccgatcgtgtctgcgtgggagaagggcatggaggctgcgcgcgcgctgatggacaagtaccacgtggataacgatctaaaggcgaacttcaaactactgcctgaccaagtggaagctctggcggccgtatgcaagacctggctgaacgaggagcaccgcgggttgcagctgaccttcaccagcaacaagacctttgtgacgatgatggggcgattcctgcaggcgtacctgcagtcgtttgcagaggtgacctacaagcatcacgagcccacgggctgcgcgttgtggctgcaccgctgcgctgagatcgaaggcgagcttaagtgtctacacggaagcattatgataaataaggagcacgtgattgaaatggatgtgacgagcgaaaacgggcagcgcgcgctgaaggagcagtctagcaaggccaagatcgtgaagaaccggtggggccgaaatgtggtgcagatctccaacaccgacgcaaggtgctgcgtgcacgacgcggcctgtcctgccaatcagttttccggcaagtcttgcggcatgttcttctctgaaggcgcaaaggctcaggtggcttttaagcagatcaaggcttttatgcaggcgctgtatcctaacgcccagaccgggcacggtcaccttttgatgccactacggtgcgagtgcaactcaaagcctgggcacgcgccctttttgggaaggcagctaccaaagttgactccgttcgccctgagcaacgcggaggacctggacgcggatctgatctccgacaagagcgtgctggccagcgtgcaccacccggcgctgatagtgttccagtgctgcaaccctgtgtatcgcaactcgcgcgcgcagggcggaggccccaactgcgacttcaagatatcggcgcccgacctgctaaacgcgttggtgatggtgcgcagcctgtggagtgaaaacttcaccgagctgccgcggatggttgtgcctgagtttaagtggagcactaaacaccagtatcgcaacgtgtccctgccagtggcgcatagcgatgcgcggcagaacccctttgatttttaagatggccggccgcttcgagcagacatgataagatacattgatgagtttggacaaaccacaactagaatgcagtgaaaaaaatgctttatttgtgaaatttgtgatgctattgctttatttgtaaccattataagctgcaataaacaagttaacaacaacaattgcattcattttatgtttcaggttcagggggaggtgtgggaggttttttaaagcaagtaaaacctctacaaatgtggtagcggccgcggcgctcttccgcttcctcgctcactgactcgctgcgctcggtcgttcggctgcggcgagcggtatcagctcactcaaaggcggtaatacggttatccacagaatcaggggataacgcaggaaagaacatgtgagcaaaaggccagcaaaaggccaggaaccgtaaaaaggccgcgttgctggcgttggcctacttggccgttttagggcggagtaacttgtatgtgttgggaattgtagttttcttaaaatgggaagttacgtaacgtgggaaaacggaagtgacgatttgaggaagttgtgggttttttggctttcgtttctgggcgtaggttcgcgtgcggttttctgggtgttttttgtggactttaaccgttacgtcattttttagtcctatatatactcgctctgcacttggcccttttttacactgtgactgattgagctggtgccgtgtcgagtggtgtttttttaataggttttcttttttactggtaaggctgactgttatgactacgtccggcgttccatttggcatgacactacgaccaacacgatctcggttgtctcggcgcactccgtacagtagggatcgtctacctccttttgagacagaaacccgcgctaccatactggaggatcatccgctgctgcccgaatgtaacactttgacaatgcacaacgtgagttacgtgcgaggtcttccctgcagtgtgggatttacgctgattcaggaatgggttgttccctgggatatggttctaacgcgggaggagcttgtaatcctgaggaagtgtatgcacgtgtgcctgtgttgtgccaacattgatatcatgacgagcatgatgatccatggttacgagtcctgggctctccactgtcattgttccagtcccggttccctgcagtgtatagccggcgggcaggttttggccagctggtttaggatggtggtggatggcgccatgtttaatcagaggtttatatggtaccgggaggtggtgaattacaacatgccaaaagaggtaatgtttatgtccagcgtgtttatgaggggtcgccacttaatctacctgcgcttgtggtatgatggccacgtgggttctgtggtccccgccatgagctttggatacagcgccttgcactgtgggattttgaacaatattgtggtgctgtgctgcagttactgtgctgatttaagtgagatcagggtgcgctgctgtgcccggaggacaaggcgccttatgctgcgggcggtgcgaatcatcgctgaggagaccactgccatgttgtattcctgcaggacggagcggcggcggcagcagtttattcgcgcgctgctgcagcaccaccgccctatcctgatgcacgattatgactctacccccatgtaagaattcctagagctcgctgatcagcctcgactgtgccttctagttgccagccatctgttgtttgcccctcccccgtgccttccttgaccctggaaggtgccactcccactgtcctttcctaataaaatgaggaaattgcatcgcattgtctgagtaggtgtcattctattctggggggtggggtggggcaggacagcaagggggaggattgggaagagaatagcaggcatgctggggaggccttgttggccggctccggtgcccgtcagtgggcagagcgcacatcgcccacagtccccgagaagttggggggaggggtcggcaattgaaccggtgcctagagaaggtggcgcggggtaaactgggaaagtgatgtcgtgtactggctccgcctttttcccgagggtgggggagaaccgtatataagtgcagtagtcgccgtgaacgttctttttcgcaacgggtttgccgccagaacacaggtaagtgccgtgtgtggttcccgcgggcctggcctctttacgggttatggcccttgcgtgccttgaattacttccacctggctgcagtacgtgattcttgatcccgagcttcgggttggaagtgggtgggagagttcgaggccttgcgcttaaggagccccttcgcctcgtgcttgagttgaggcctggcctgggcgctggggccgccgcgtgcgaatctggtggcaccttcgcgcctgtctcgctgctttcgataagtctctagccatttaaaatttttgatgacctgctgcgacgctttttttctggcaagatagtcttgtaaatgcgggccaagatctgcacactggtatttcggtttttggggccgcgggcggcgacggggcccgtgcgtcccagcgcacatgttcggcgaggcggggcctgcgagcgcggccaccgagaatcggacgggggtagtctcaagctggccggcctgctctggtgcctggtctcgcgccgccgtgtatcgccccgccctgggcggcaaggctggcccggtcggcaccagttgcgtgagcggaaagatggccgcttcccggccctgctgcagggagctcaaaatggaggacgcggcgctcgggagagcgggcgggtgagtcacccacacaaaggaaaagggcctttccgtcctcagccgtcgcttcatgtgactccacggagtaccgggcgccgtccaggcacctcgattagttctcgagcttttggagtacgtcgtctttaggttggggggaggggttttatgcgatggagtttccccacactgagtgggtggagactgaagttaggccagcttggcacttgatgtaattctccttggaatttgccctttttgagtttggatcttggttcattctcaagcctcagacagtggttcaaagtttttttcttccatttcaggtgtcgtgagccaccatggctgccgatggttatcttccagattggctcgaggacaacctctctgagggcattcgcgagtggtgggacttgaaacctggagccccgaagcccaaagccaaccagcaaaagcaggacgacggccggggtctggtgcttcctggctacaagtacctcggacccttcaacggactcgacaagggggagcccgtcaacgcggcggacgcagcggccctcgagcacgacaaggcctacgaccagcagctcaaagcgggtgacaatccgtaccttcggtataaccacgccgacgccgagtttcaggagcgtctgcaagaagatacgtcttttgggggcaacctcgggcgagcagtcttccaggccaagaagcgggttctcgaacctctcggtctggttgaggaaggcgctaagacggctcctggaaagaaacgtccggtagagcagtcgccacaagagccagactcctcctcgggcatcggcaagacaggccagcagcccgctaaaaagagactcaattttggtcagactggcgactcagagtcagtccccgacccacaacctctcggagaacctccagcaacccccgctgctgtgggacctactacaatggcttcaggcggtggcgcaccaatggcagacaataacgaaggcgccgacggagtgggtaatgcctcaggaaattggcattgcgattccacatggctgggcgacagagtcatcaccaccagcacccgcacctgggccttgcccacctacaataaccacctctacaagcaaatctccagtgcttcaacgggggccagcaacgacaaccactacttcggctacagcaccccctgggggtattttgatttcaacagattccactgccacttttcaccacgtgactggcagcgactcatcaacaacaattggggattccggcccaagagactcaacttcaaactcttcaacatccaagtcaaggaggtcacgacgaatgatggcgtcacaaccatcgctaataaccttaccagcacggttcaagtcttctcggactcggagtaccagcttccgtacgtcctcggctctgcgcaccagggctgcctccctccgttcccggcggacgtgttcatgattccgcaatacggctacctgacgctcaacaatggcagccaagccgtgggacgttcatccttttactgcctggaatatttcccttctcagatgctgagaacgggcaacaactttaccttcagctacacctttgaggaagtgcctttccacagcagctacgcgcacagccagagcctggaccggctgatgaatcctctcatcgaccaatacctgtattacctgaacagaactcaaaatcagtccggaagtgcccaaaacaaggacttgctgtttagccgtgggtctccagctggcatgtctgttcagcccaaaaactggctacctggaccctgttatcggcagcagcgcgtttctaaaacaaaaacagacaacaacaacagcaattttacctggactggtgcttcaaaatataacctcaatgggcgtgaatccatcatcaaccctggcactgctatggcctcacacaaagacgacgaagacaagttctttcccatgagcggtgtcatgatttttggaaaagagagcgccggagcttcaaacactgcattggacaatgtcatgattacagacgaagaggaaattaaagccactaaccctgtggccaccgaaagatttgggaccgtggcagtcaatttccagagcagcagcacagaccctgcgaccggagatgtgcatgctatgggagcattacctggcatggtgtggcaagatagagacgtgtacctgcagggtcccatttgggccaaaattcctcacacagatggacactttcacccgtctcctcttatgggcggctttggactcaagaacccgcctcctcagatcctcatcaaaaacacgcctgttcctgcgaatcctccggcggagttttcagctacaaagtttgcttcattcatcacccaatactccacaggacaagtgagtgtggaaattgaatgggagctgcagaaagaaaacagcaagcgctggaatcccgaagtgcagtacacatccaattatgcaaaatctgccaacgttgattttactgtggacaacaatggactttatactgagcctcgccccattggcacccgttaccttacccgtcccctgtaatctctagagtcgacactagtgcggatccacgggtggcatccctgtgacccctccccagtgcctctcctggccctggaagttgccactccagtgcccaccagccttgtcctaataaaattaagttgcatcattttgtctgactaggtgtccttctataatattatggggtggaggggggtggtatggagcaaggggcaagttgggaagacaacctgtagggcctgcggggtctattgggaaccaagctggagtgcagtggcacaatcttggctcactgcaatctccgcctcctgggttcaagcgattctcctgcctcagcctcccgagttgttgggattccaggcatgcatgaccaggctcagctaatttttgtttttttggtagagacggggtttcaccatattggccaggctggtctccaactcctaatctcaggtgatctacccaccttggcctcccaaattgctgggattacaggcgtgaaccactgctcccttccctgtccttatcgatagatctggcctgattggccttctaccgggtaggggaggcgcttttcccaaggcagtctggagcatgcgctttagcagccccgctgggcacttggcgctacacaagtggcctctggcctcgcacacattccacatccaccggtaggcgccaaccggctccgttctttggtggccccttcgcgccaccttctactcctcccctagtcaggaagttcccccccgccccgcagctcgcgtcgtgcaggacgtgacaaatggaagtagcacgtctcactagtctcgtgcagatggacagcaccgctgagcaatggaagcgggtaggcctttggggcagcggccaatagcagctttgctccttcgctttctgggctcagaggctgggaaggggtgggtccgggggcgggctcaggggcgggctcaggggcggggcgggcgcccgaaggtcctccggaggcccggcattctgcacgcttcaaaagcgcacgtctgccgcgctgttctcctcttcctcatctccgggcctttcgacctgccaccatgccggggttttacgagattgtgattaaggtccccagcgaccttgacgagcatctgcccggcatttctgacagctttgtgaactgggtggccgagaaggaatgggagttgccgccagattctgacatggatctgaatctgattgagcaggcacccctgaccgtggccgagaagctgcagcgcgactttctgacggaatggcgccgtgtgagtaaggctccggaggcccttttctttgtgcaatttgagaagggagagagctacttccacatgcacgtgctcgtggaaaccaccggggtgaaatccatggttttgggacgtttcctgagtcagattcgcgaaaaactgattcagagaatttaccgcgggatcgagccgactttgccaaactggttcgcggtcacaaagaccagaaatggcgccggaggcgggaacaaggtggtggatgagtgctacatccccaattacttgctccccaaaacccagcctgagctccagtgggcgtggactaatatggaacagtatttaagcgcctgtttgaatctcacggagcgtaaacggttggtggcgcagcatctgacgcacgtgtcgcagacgcaggagcagaacaaagagaatcagaatcccaattctgatgcgccggtgatcagatcaaaaacttcagccaggtacatggagctggtcgggtggctcgtggacaaggggattacctcggagaagcagtggatccaggaggaccaggcctcatacatctccttcaatgcggcctccaactcgcggtcccaaatcaaggctgccttggacaatgcgggaaagattatgagcctgactaaaaccgcccccgactacctggtgggccagcagcccgtggaggacatttccagcaatcggatttataaaattttggaactaaacgggtacgatccccaatatgcggcttccgtctttctgggatgggccacgaaaaagttcggcaagaggaacaccatctggctgtttgggcctgcaactaccgggaagaccaacatcgcggaggccatagcccacactgtgcccttctacgggtgcgtaaactggaccaatgagaactttcccttcaacgactgtgtcgacaagatggtgatctggtgggaggaggggaagatgaccgccaaggtcgtggagtcggccaaagccattctcggaggaagcaaggtgcgcgtggaccagaaatgcaagtcctcggcccagatagacccgactcccgtgatcgtcacctccaacaccaacatgtgcgccgtgattgacgggaactcaacgaccttcgaacaccagcagccgttgcaagaccggatgttcaaatttgaactcacccgccgtctggatcatgactttgggaaggtcaccaagcaggaagtcaaagactttttccggtgggcaaaggatcacgtggttgaggtggagcatgaattctacgtcaaaaagggtggagccaagaaaagacccgcccccagtgacgcagatataagtgagcccaaacgggtgcgcgagtcagttgcgcagccatcgacgtcagacgcggaagcttcgatcaactacgcagacaggtaccaaaacaaatgttctcgtcacgtgggcatgaatctgatgctgtttccctgcagacaatgcgagagaatgaatcagaattcaaatatctgcttcactcacggacagaaagactgtttagagtgctttcccgtgtcagaatctcaacccgtttctgtcgtcaaaaaggcgtatcagaaactgtgctacattcatcatatcatgggaaaggtgccagacgcttgcactgcctgcgatctggtcaatgtggatttggatgactgcatctttgaacaataaatgatttaaatcaggtatggctgccgatggttatcttccagattggctcgaggacaacctctctaaaataaaaagacagaataaacctattggttaaaaaatgagctgatttaacggccttcttggccgcccttcccggtcgatatgaacagcttatttacataattcacgttattggtagttataaatgaaattcctaatatcggttatgaagtgaaattgaatttctacttgatctttctctctatttttgtaaaataaaattaagaatatttaaatattcaatgattcatttttgcagaaatcggaggaagaagaatatatgaaaacatttaacatttctcaacaagatccccccatattgttgtataagtgatgaaatactgaatttaaaacttagtttatatgtggtaaaatgttttaatcaagtttaggaggaattaattatgaagtgtaatgaataatgaatgtaacagggttcaattaaaagagggaagcgtatcattaaccctataaactacgtctgccctcattattggagggtgaaatgtgaatacatcctattcacaatcgaatttacgacacaaccaaattttaatttggctttgcattttatctttttttagcgtattaaatgaaatggttttgaacgtctcattacctgatattgcaaatgattttaataaaccaccagcgagtacaaactgggtgaacacagcctttatgttaaccttttccattggaacagctgtatatggaaagctatctgatcaattaggcatcaaaaggttactcctatttggaattataataaattgtttcgggtcggtaattgggtttgttggccattctttcttttccttacttattatggctcgttttattcaaggggctggtgcagctgcatttccagcactcgtaatggttgtagttgcgcgctatattccaaaggaaaataggggtaaagcatttggtcttattggatcgatagtagccatgggagaaggagtcggtccagcgattggtggaatgatagcccattatattcattggtcctatcttctactcattcctatgataacaattatcactgttccgtttcttatgaaattattaaagaaagaagtaaggataaaaggtcattttgatatcaaaggaattatactaatgtctgtaggcattgtattttttatgttgtttacaacatcatatagcatttcttttcttatcgttagcgtgctgtcattcctgatatttgtaaaacatatcaggaaagtaacagatccttttgttgatcccggattagggaaaaatataccttttatgattggagttctttgtgggggaattatatttggaacagtagcagggtttgtctctatggttccttatatgatgaaagatgttcaccagctaagtactgccgaaatcggaagtgtaattattttccctggaacaatgagtgtcattattttcggctacattggtgggatacttgttgatagaagaggtcctttatacgtgttaaacatcggagttacatttctttctgttagctttttaactgcttcctttcttttagaaacaacatcatggttcatgacaattataatcgtatttgttttaggtgggctttcgttcaccaaaacagttatatcaacaattgtttcaagtagcttgaaacagcaggaagctggtgctggaatgagtttgcttaactttaccagctttttatcagagggaacaggtattgcaattgtaggtggtttattatccatacccttacttgatcaaaggttgttacctatggaagttgatcagtcaacttatctgtatagtaatttgttattacttttttcaggaatcattgtcattagttggctggttaccttgaatgtatataaacattctcaaagggatttctaaatcgttaagggatcaactttgggagagagttcaaaattgatcctttttttataacaggaattgggcatcaaataaaacgaaaggctcagtcgaaagactgggcctttcgttttatctgttgtttgtcggtgaacgctctcctgagtaggacaaatccgccgggagcggatttgaacgttgcgaagcaacggcccggagggtggcgggcaggacgcccgccataaactgccaggcatcaaattaagcagaaggccatcctgacggatggcctttttgcgtttctacaaactcttcctgtcgtcatatctacaattctacacagcccagtccagactattgaattgtatcacgtttttgatatcctaccaataacaaattgattggaggaatgcaaagtgaataatgaaccagtaaaacgtggtaagaagaacagatgggaattaaacctacctataatgacttatgtagtagctgatgattggattgataaactaggacacgaaacgtttactttatggttgaggttccatacttgggtagatagagaagatgaactccgagattatgatcgcatacctagaagttttgagaacatatataaaaagacactaggaatctcaaaaagtaagttttatagattgataaaacctttatgggaatatggattaatagacatcatagaatacgaagaatctaaccgtaattctactaaacctaaaaatataattgtttatgagtatcctttacacgaaatagaaagaaagtataaaccactagaaaaattaagagattgggataaagactataattccgtttctaaagaattaggtaaaacaggtggtagaccaaggaaaaaagatagtgaagaagaacccgaaaagaaacccgaagaagtaactaaaaagaaacgtaaatataagttaaaaagagttatccacaacggtttcaaaaatgaaacggtggagggtttcaaaaatgaaacggtggagggtttcaaaaatgaaacggtgaccgtttcaaaaataaaacccaataattattcaaatatctttaataacttatcaaatatttctactaatgtttcaaataatttattaattgatgatgatgaggaaatcgaaaatgaaccaactggtcgtacaataaataggtcattacttttttcacaagaagatattaaacaggcctatcaatttattaatagattttcagttatacagttacgtgaaaactttagctttgataaacactttgaagaacggttggtatgttatttatggaaagcagggatttctactttttacacgcacgaaatcagtaaaatgataaaaaaaatagcagactatgaaaaatctaaaaaaggtagattaaacccaatacgtgaccgagccttatatatggtaaatggtcttgtaatgaatagagcttcttcccaaagtgaacatgctacttataaactaaaccaatataaaaaacagaaggaacaggaaaaacaacaacaggagcaacaaagatcaagagtaccgttctataattggttggaggaaagagaagaacaaaccgaaggtcaactacccaccacttaagcggccgcaagcttgaagagctcttctttcagaacgctcggttgccgccgggcgttttttatgagacgtctcattatactggcttaactatgcggcatcagagcagattgtactgagagtgcaccatatgcggtgtgaaataccgcacagatgcgtaaggagaaaataccgcatcaggcgctcttccgcttcctcgctcactgactcgctgcgctcggtcgttcggctgcggcgagcggtatcagctcactcaaaggcggtaatacggttatccacagaatcaggggataacgcaggaaagaacatgtgagcaaaaggccagcaaaaggccaggaaccgtaaaaaggccgcgttgctggcgtttttccataggctccgcccccctgacgagcatcacaaaaatcgacgctcaagtcagaggtggcgaaacccgacaggactataaagataccaggcgtttccccctggaagctccctcgtgcgctctcctgttccgaccctgccgcttaccggatacctgtccgcctttctcccttcgggaagcgtggcgctttctcatagctcacgctgtaggtatctcagttcggtgtaggtcgttcgctccaagctgggctgtgtgcacgaaccccccgttcagcccgaccgctgcgccttatccggtaactatcgtcttgagtccaacccggtaagacacgacttatcgccactggcagcagccactggtaacaggattagcagagcgaggtatgtaggcggtgctacagagttcttgaagtggtggcctaactacggctacactagaaggacagtatttggtatctgcgctctgctgaagccagttaccttcggaaaaagagttggtagctcttgatccggcaaacaaaccaccgctggtagcggtggtttttttgtttgcaagcagcagattacgcgcagaaaaaaaggatctcaagaagatcctttgatcttttctacggggtctgacgctcagtggaacgaaaactcacgttaagggattttggtcatgagattatcaaaaaggatcttcacctagatccttttaaattaaaaatgaagttttaaatcaatctaaagtatatatgagtaaacttggtctgacagttaccaatgcttaatcagtgaggcacctatctcagcgatctgtctatttcgttcatccatagttgcctgactccccgtcgtgtagataactacgatacgggagggcttaccatctggccccagtgctgcaatgataccgcgagacccacgctcaccggctccagatttatcagcaataaaccagccagccggaagggccgagcgcagaagtggtcctgcaactttatccgcctccatccagtctattaattgttgccgggaagctagagtaagtagttcgccagttaatagtttgcgcaacgttgttgccattgctgcaggcatcgtggtgtcacgctcgtcgtttggtatggcttcattcagctccggttcccaacgatcaaggcgagttacatgatcccccatgttgtgcaaaaaagcggttagctccttcggtcctccgatcgttgtcagaagtaagttggccgcagtgttatcactcatggttatggcagcactgcataattctcttactgtcatgccatccgtaagatgcttttctgtgactggtgagtactcaaccaagtcattctgagaatagtgtatgcggcgaccgagttgctcttgcccggcgtcaacacgggataataccgcgccacatagcagaactttaaaagtgctcatcattggaaaacgttcttcggggcgaaaactctcaaggatcttaccgctgttgagatccagttcgatgtaacccactcgtgcacccaactgatcttcagcatcttttactttcaccagcgtttctgggtgagcaaaaacaggaaggcaaaatgccgcaaaaaagggaataagggcgacacggaaatgttgaatactcatactcttcctttttcaatattattgaagcatttatcagggttattgtctcatgagcggatacatatttgaatgtatttagaaaaataaacaaataggggttccgcgcacatttccccgaaaagtgccacctgacgtctaagaaaccattattatcatgacattaacctataaaaataggcgtatcacgaggccctttcgtcttcaagaattctcatgtttgacagcttatcatcgataagcttgggcctgtttggcc

SEQ ID NO: 245 - DNA, 17734 bp, synthetic construct
  misc_feature 1..17734: note = Seed plasmid #17
  source 1..17734: mol_type = other DNA
ggcctgtttggccacgcggtaggaggaggggagggtgccctgcatgtctgccgctgctcttgctcttgccgctgctgaggaggggggcgcatctgccgcagcaccggatgcatctgggaaaagcaaaaaaggggctcgtccctgtttccggaggaatttgcaagcggggtcttgcatgacggggaggcaaacccccgttcgccgcagtccggccggtccgagactcgaaccgggggtcccgcgactcaacccttggaaaataaccctccggctacagggagcgagccacttaatgctttcgctttccagcctaaccgcttacgctgcgcgcggccagtggccaaaaaagctagcgcagcagccgccgcgcctggaaggaagccaaaaggagcactcccccgttgtctgacgtcgcacacctgggttcgacacgcgggcggtaaccgcatggatcacggcggacggccggatacggggctcgaaccccggtcgtccgccatgatacccttgcgaatttatccaccagaccacggaagagtgcccgcttacaggctctccttttgcacggtctagagcgtcaacgattgcgcgcgcctgaccggccagagcgtcccgaccatggagcactttttgccgctgcgcaacatctggaaccgcgtccgcgactttccgcgcgcctccaccaccgccgccggcatcacctggatgtccaggtacatctaccaattgacatgtgagcaaaaggccagcaaaaggccaggaaccgtaaaaaggccgcgttgctggcgttggccttgatggccttctaccgggtaggggaggcgcttttcccaaggcagtctggagcatgcgctttagcagccccgctgggcacttggcgctacacaagtggcctctggcctcgcacacattccacatccaccggtaggcgccaaccggctccgttctttggtggccccttcgcgccaccttctactcctcccctagtcaggaagttcccccccgccccgcagctcgcgtcgtgcaggacgtgacaaatggaagtagcacgtctcactagtctcgtgcagatggacagcaccgctgagcaatggaagcgggtaggcctttggggcagcggccaatagcagctttgctccttcgctttctgggctcagaggctgggaaggggtgggtccgggggcgggctcaggggcgggctcaggggcggggcgggcgcccgaaggtcctccggaggcccggcattctgcacgcttcaaaagcgcacgtctgccgcgctgttctcctcttcctcatctccgggcctttcgacctgccaccatggccagtcgggaagaggagcagcgcgaaaccacccccgagcgcggacgcggtgcggcgcgacgtcccccaaccatggaggacgtgtcgtccccgtccccgtcgccgccgcctccccgggcgcccccaaaaaagcggatgaggcggcgtatcgagtccgaggacgaggaagactcatcacaagacgcgctggtgccgcgcacacccagcccgcggccatcgacctcggcggcggatttggccattgcgcccaagaagaaaaagaagcgcccttctcccaagcccgagcgcccgccatcaccagaggtaatcgtggacagcgaggaagaaagagaagatgtggcgctacaaatggtgggtttcagcaacccaccggtgctaatcaagcatggcaaaggaggtaagcgcacagtgcggcggctgaatgaagacgacccagtggcgcgtggtatgcggacgcaagaggaagaggaagagcccagcgaagcggaaagtgaaattacggtgatgaacccgctgagtgtgccgatcgtgtctgcgtgggagaagggcatggaggctgcgcgcgcgctgatggacaagtaccacgtggataacgatctaaaggcgaacttcaaactactgcctgaccaagtggaagctctggcggccgtatgcaagacctggctgaacgaggagcaccgcgggttgcagctgaccttcaccagcaacaagacctttgtgacgatgatggggcgattcctgcaggcgtacctgcagtcgtttgcagaggtgacctacaagcatcacgagcccacgggctgcgcgttgtggctgcaccgctgcgctgagatcgaaggcgagcttaagtgtctacacggaagcattatgataaataaggagcacgtgattgaaatggatgtgacgagcgaaaacgggcagcgcgcgctgaaggagcagtctagcaaggccaagatcgtgaagaaccggtggggccgaaatgtggtgcagatctccaacaccgacgcaaggtgctgcgtgcacgacgcggcctgtcctgccaatcagttttccggcaagtcttgcggcatgttcttctctgaaggcgcaaaggctcaggtggcttttaagcagatcaaggcttttatgcaggcgctgtatcctaacgcccagaccgggcacggtcaccttttgatgccactacggtgcgagtgcaactcaaagcctgggcacgcgccctttttgggaaggcagctaccaaagttgactccgttcgccctgagcaacgcggaggacctggacgcggatctgatctccgacaagagcgtgctggccagcgtgcaccacccggcgctgatagtgttccagtgctgcaaccctgtgtatcgcaactcgcgcgcgcagggcggaggccccaactgcgacttcaagatatcggcgcccgacctgctaaacgcgttggtgatggtgcgcagcctgtggagtgaaaacttcaccgagctgccgcggatggttgtgcctgagtttaagtggagcactaaacaccagtatcgcaacgtgtccctgccagtggcgcatagcgatgcgcggcagaacccctttgatttttaagatggccggccgcttcgagcagacatgataagatacattgatgagtttggacaaaccacaactagaatgcagtgaaaaaaatgctttatttgtgaaatttgtgatgctattgctttatttgtaaccattataagctgcaataaacaagttaacaacaacaattgcattcattttatgtttcaggttcagggggaggtgtgggaggttttttaaagcaagtaaaacctctacaaatgtggtagcggccgcggcgctcttccgcttcctcgctcactgactcgctgcgctcggtcgttcggctgcggcgagcggtatcagctcactcaaaggcggtaatacggttatccacagaatcaggggataacgcaggaaagaacatgtgagcaaaaggccagcaaaaggccaggaaccgtaaaaaggccgcgttgctggcgttggcctacttggccggtgcagcggcctccgcgccgggttttggcgcctcccgcgggcgcccccctcctcacggcgagcgctgccacgtcagacgaagggcgcagcgagcgtcctgatccttccgcccggacgctcaggacagcggcccgctgctcataagactcggccttagaaccccagtatcagcagaaggacattttaggacgggacttgggtgactctagggcactggttttctttccagagagcggaacaggcgaggaaaagtagtcccttctcggcgattctgcggagggatctccgtggggcggtgaacgccgatgattatataaggacgcgccgggtgtggcacagctagttccgtcgcagccgggatttgggtcgcggttcttgtttgtggatcgctgtgatcgtcacttggtgagtagcgggctgctgggctggccggggctttcgtggccgccgggccgctcggtgggacggaagcgtgtggagagaccgccaagggctgtagtctgggtccgcgagcaaggttgccctgaactgggggttggggggagcgcagcaaaatggcggctgttcccgagtcttgaatggaagacgcttgtgaggcgggctgtgaggtcgttgaaacaaggtggggggcatggtgggcggcaagaacccaaggtcttgaggccttcgctaatgcgggaaagctcttattcgggtgagatgggctggggcaccatctggggaccctgacgtgaagtttgtcactgactggagaactcggtttgtcgtctgttgcgggggcggcagttatggcggtgccgttgggcagtgcacccgtacctttgggagcgcgcgccctcgtcgtgtcgtgacgtcacccgttctgttggcttataatgcagggtggggccacctgccggtaggtgtgcggtaggcttttctccgtcgcaggacgcagggttcgggcctagggtaggctctcctgaatcgacaggcgccggacctctggtgaggggagggataagtgaggcgtcagtttctttggtcggttttatgtacctatcttcttaagtagctgaagctccggttttgaactatgcgctcggggttggcgagtgtgttttgtgaagttttttaggcaccttttgaaatgtaatcatttgggtcaatatgtaattttcagtgttagactagtaaagccaccatgactacgtccggcgttccatttggcatgacactacgaccaacacgatctcggttgtctcggcgcactccgtacagtagggatcgtctacctccttttgagacagaaacccgcgctaccatactggaggatcatccgctgctgcccgaatgtaacactttgacaatgcacaacgtgagttacgtgcgaggtcttccctgcagtgtgggatttacgctgattcaggaatgggttgttccctgggatatggttctaacgcgggaggagcttgtaatcctgaggaagtgtatgcacgtgtgcctgtgttgtgccaacattgatatcatgacgagcatgatgatccatggttacgagtcctgggctctccactgtcattgttccagtcccggttccctgcagtgtatagccggcgggcaggttttggccagctggtttaggatggtggtggatggcgccatgtttaatcagaggtttatatggtaccgggaggtggtgaattacaacatgccaaaagaggtaatgtttatgtccagcgtgtttatgaggggtcgccacttaatctacctgcgcttgtggtatgatggccacgtgggttctgtggtccccgccatgagctttggatacagcgccttgcactgtgggattttgaacaatattgtggtgctgtgctgcagttactgtgctgatttaagtgagatcagggtgcgctgctgtgcccggaggacaaggcgccttatgctgcgggcggtgcgaatcatcgctgaggagaccactgccatgttgtattcctgcaggacggagcggcggcggcagcagtttattcgcgcgctgctgcagcaccaccgccctatcctgatgcacgattatgactctacccccatgtaagaattcctagagctcgctgatcagcctcgactgtgccttctagttgccagccatctgttgtttgcccctcccccgtgccttccttgaccctggaaggtgccactcccactgtcctttcctaataaaatgaggaaattgcatcgcattgtctgagtaggtgtcattctattctggggggtggggtggggcaggacagcaagggggaggattgggaagagaatagcaggcatgctggggaggccttgttggccaggtgacaaagcaggaagtcaaagagttcttccgctgggcgcaggatcacgtgaccgaggtggcgcatgagttctacgtcagaaagggtggagccaacaaaagacccgcccccgatgacgcggataaaagcgagcccaagcgggcctgcccctcagtcgcggatccatcgacgtcagacgcggaaggagctccggtggactttgccgacaggtaccaaaacaaatgttctcgtcacgcgggcatgcttcagatgctgtttccctgcaagacatgcgagagaatgaatcagaatttcaacatttgcttcacgcacgggacgagagactgttcagagtgcttccccggcgtgtcagaatctcaaccggtcgtcagaaagaggacgtatcggaaactctgtgccattcatcatctgctggggcgggctcccgagattgcttgctcggcctgcgatctggtcaacgtggacctggatgactgtgtttctgagcaataaatgacttaaaccaggtatggctgccgatggttatcttccagattggctcgaggacaacctctctgagggcattcgcgagtggtgggacttgaaacctggagccccgaagcccaaagccaaccagcaaaagcaggacgacggccggggtctggtgcttcctggctacaagtacctcggacccttcaacggactcgacaagggggagcccgtcaacgcggcggacgcagcggccctcgagcacgacaaggcctacgaccagcagctcaaagcgggtgacaatccgtaccttcggtataaccacgccgacgccgagtttcaggagcgtctgcaagaagatacgtcttttgggggcaacctcgggcgagcagtcttccaggccaagaagcgggttctcgaacctctcggtctggttgaggaaggcgctaagacggctcctggaaagaaacgtccggtagagcagtcgccacaagagccagactcctcctcgggcatcggcaagacaggccagcagcccgctaaaaagagactcaattttggtcagactggcgactcagagtcagtccccgacccacaacctctcggagaacctccagcaacccccgctgctgtgggacctactacaatggcttcaggcggtggcgcaccaatggcagacaataacgaaggcgccgacggagtgggtaatgcctcaggaaattggcattgcgattccacatggctgggcgacagagtcatcaccaccagcacccgcacctgggccttgcccacctacaataaccacctctacaagcaaatctccagtgcttcaacgggggccagcaacgacaaccactacttcggctacagcaccccctgggggtattttgatttcaacagattccactgccacttttcaccacgtgactggcagcgactcatcaacaacaattggggattccggcccaagagactcaacttcaaactcttcaacatccaagtcaaggaggtcacgacgaatgatggcgtcacaaccatcgctaataaccttaccagcacggttcaagtcttctcggactcggagtaccagcttccgtacgtcctcggctctgcgcaccagggctgcctccctccgttcccggcggacgtgttcatgattccgcaatacggctacctgacgctcaacaatggcagccaagccgtgggacgttcatccttttactgcctggaatatttcccttctcagatgctgagaacgggcaacaactttaccttcagctacacctttgaggaagtgcctttccacagcagctacgcgcacagccagagcctggaccggctgatgaatcctctcatcgaccaatacctgtattacctgaacagaactcaaaatcagtccggaagtgcccaaaacaaggacttgctgtttagccgtgggtctccagctggcatgtctgttcagcccaaaaactggctacctggaccctgttatcggcagcagcgcgtttctaaaacaaaaacagacaacaacaacagcaattttacctggactggtgcttcaaaatataacctcaatgggcgtgaatccatcatcaaccctggcactgctatggcctcacacaaagacgacgaagacaagttctttcccatgagcggtgtcatgatttttggaaaagagagcgccggagcttcaaacactgcattggacaatgtcatgattacagacgaagaggaaattaaagccactaaccctgtggccaccgaaagatttgggaccgtggcagtcaatttccagagcagcagcacagaccctgcgaccggagatgtgcatgctatgggagcattacctggcatggtgtggcaagatagagacgtgtacctgcagggtcccatttgggccaaaattcctcacacagatggacactttcacccgtctcctcttatgggcggctttggactcaagaacccgcctcctcagatcctcatcaaaaacacgcctgttcctgcgaatcctccggcggagttttcagctacaaagtttgcttcattcatcacccaatactccacaggacaagtgagtgtggaaattgaatgggagctgcagaaagaaaacagcaagcgctggaatcccgaagtgcagtacacatccaattatgcaaaatctgccaacgttgattttactgtggacaacaatggactttatactgagcctcgccccattggcacccgttaccttacccgtcccctgtaatctctagagtcgacactagtgcggatccacgggtggcatccctgtgacccctccccagtgcctctcctggccctggaagttgccactccagtgcccaccagccttgtcctaataaaattaagttgcatcattttgtctgactaggtgtccttctataatattatggggtggaggggggtggtatggagcaaggggcaagttgggaagacaacctgtagggcctgcggggtctattgggaaccaagctggagtgcagtggcacaatcttggctcactgcaatctccgcctcctgggttcaagcgattctcctgcctcagcctcccgagttgttgggattccaggcatgcatgaccaggctcagctaatttttgtttttttggtagagacggggtttcaccatattggccaggctggtctccaactcctaatctcaggtgatctacccaccttggcctcccaaattgctgggattacaggcgtgaaccactgctcccttccctgtccttatcgatagatctggcctgattggccggctccggtgcccgtcagtgggcagagcgcacatcgcccacagtccccgagaagttggggggaggggtcggcaattgaaccggtgcctagagaaggtggcgcggggtaaactgggaaagtgatgtcgtgtactggctccgcctttttcccgagggtgggggagaaccgtatataagtgcagtagtcgccgtgaacgttctttttcgcaacgggtttgccgccagaacacaggtaagtgccgtgtgtggttcccgcgggcctggcctctttacgggttatggcccttgcgtgccttgaattacttccacctggctgcagtacgtgattcttgatcccgagcttcgggttggaagtgggtgggagagttcgaggccttgcgcttaaggagccccttcgcctcgtgcttgagttgaggcctggcctgggcgctggggccgccgcgtgcgaatctggtggcaccttcgcgcctgtctcgctgctttcgataagtctctagccatttaaaatttttgatgacctgctgcgacgctttttttctggcaagatagtcttgtaaatgcgggccaagatctgcacactggtatttcggtttttggggccgcgggcggcgacggggcccgtgcgtcccagcgcacatgttcggcgaggcggggcctgcgagcgcggccaccgagaatcggacgggggtagtctcaagctggccggcctgctctggtgcctggtctcgcgccgccgtgtatcgccccgccctgggcggcaaggctggcccggtcggcaccagttgcgtgagcggaaagatggccgcttcccggccctgctgcagggagctcaaaatggaggacgcggcgctcgggagagcgggcgggtgagtcacccacacaaaggaaaagggcctttccgtcctcagccgtcgcttcatgtgactccacggagtaccgggcgccgtccaggcacctcgattagttctcgagcttttggagtacgtcgtctttaggttggggggaggggttttatgcgatggagtttccccacactgagtgggtggagactgaagttaggccagcttggcacttgatgtaattctccttggaatttgccctttttgagtttggatcttggttcattctcaagcctcagacagtggttcaaagtttttttcttccatttcaggtgtcgtgagccaccatgccggggttttacgagattgtgattaaggtccccagcgaccttgacgagcatctgcccggcatttctgacagctttgtgaactgggtggccgagaaggaatgggagttgccgccagattctgacatggatctgaatctgattgagcaggcacccctgaccgtggccgagaagctgcagcgcgactttctgacggaatggcgccgtgtgagtaaggctccggaggcccttttctttgtgcaatttgagaagggagagagctacttccacatgcacgtgctcgtggaaaccaccggggtgaaatccatggttttgggacgtttcctgagtcagattcgcgaaaaactgattcagagaatttaccgcgggatcgagccgactttgccaaactggttcgcggtcacaaagaccagaaatggcgccggaggcgggaacaaggtggtggatgagtgctacatccccaattacttgctccccaaaacccagcctgagctccagtgggcgtggactaatatggaacagtatttaagcgcctgtttgaatctcacggagcgtaaacggttggtggcgcagcatctgacgcacgtgtcgcagacgcaggagcagaacaaagagaatcagaatcccaattctgatgcgccggtgatcagatcaaaaacttcagccaggtacatggagctggtcgggtggctcgtggacaaggggattacctcggagaagcagtggatccaggaggaccaggcctcatacatctccttcaatgcggcctccaactcgcggtcccaaatcaaggctgccttggacaatgcgggaaagattatgagcctgactaaaaccgcccccgactacctggtgggccagcagcccgtggaggacatttccagcaatcggatttataaaattttggaactaaacgggtacgatccccaatatgcggcttccgtctttctgggatgggccacgaaaaagttcggcaagaggaacaccatctggctgtttgggcctgcaactaccgggaagaccaacatcgcggaggccatagcccacactgtgcccttctacgggtgcgtaaactggaccaatgagaactttcccttcaacgactgtgtcgacaagatggtgatctggtgggaggaggggaagatgaccgccaaggtcgtggagtcggccaaagccattctcggaggaagcaaggtgcgcgtggaccagaaatgcaagtcctcggcccagatagacccgactcccgtgatcgtcacctccaacaccaacatgtgcgccgtgattgacgggaactcaacgaccttcgaacaccagcagccgttgcaagaccggatgttcaaatttgaactcacccgccgtctggatcatgactttgggaaggtcaccaagcaggaagtcaaagactttttccggtgggcaaaggatcacgtggttgaggtggagcatgaattctacgtcaaaaagggtggagccaagaaaagacccgcccccagtgacgcagatataagtgagcccaaacgggtgcgcgagtcagttgcgcagccatcgacgtcagacgcggaagcttcgatcaactacgcagacaggtaccaaaacaaatgttctcgtcacgtgggcatgaatctgatgctgtttccctgcagacaatgcgagagaatgaatcagaattcaaatatctgcttcactcacggacagaaagactgtttagagtgctttcccgtgtcagaatctcaacccgtttctgtcgtcaaaaaggcgtatcagaaactgtgctacattcatcatatcatgggaaaggtgccagacgcttgcactgcctgcgatctggtcaatgtggatttggatgactgcatctttgaacaataaatgatttaaatcaggtatggctgccgatggttatcttccagattggctcgaggacaacctctctaaaataaaaagacagaataaacctattggttaaaaaatgagctgatttaacggccttcttggccgcccttcccggtcgatatgaacagcttatttacataattcacgttattggtagttataaatgaaattcctaatatcggttatgaagtgaaattgaatttctacttgatctttctctctatttttgtaaaataaaattaagaatatttaaatattcaatgattcatttttgcagaaatcggaggaagaagaatatatgaaaacatttaacatttctcaacaagatccccccatattgttgtataagtgatgaaatactgaatttaaaacttagtttatatgtggtaaaatgttttaatcaagtttaggaggaattaattatgaagtgtaatgaataatgaatgtaacagggttcaattaaaagagggaagcgtatcattaaccctataaactacgtctgccctcattattggagggtgaaatgtgaatacatcctattcacaatcgaatttacgacacaaccaaattttaatttggctttgcattttatctttttttagcgtattaaatgaaatggttttgaacgtctcattacctgatattgcaaatgattttaataaaccaccagcgagtacaaactgggtgaacacagcctttatgttaaccttttccattggaacagctgtatatggaaagctatctgatcaattaggcatcaaaaggttactcctatttggaattataataaattgtttcgggtcggtaattgggtttgttggccattctttcttttccttacttattatggctcgttttattcaaggggctggtgcagctgcatttccagcactcgtaatggttgtagttgcgcgctatattccaaaggaaaataggggtaaagcatttggtcttattggatcgatagtagccatgggagaaggagtcggtccagcgattggtggaatgatagcccattatattcattggtcctatcttctactcattcctatgataacaattatcactgttccgtttcttatgaaattattaaagaaagaagtaaggataaaaggtcattttgatatcaaaggaattatactaatgtctgtaggcattgtattttttatgttgtttacaacatcatatagcatttcttttcttatcgttagcgtgctgtcattcctgatatttgtaaaacatatcaggaaagtaacagatccttttgttgatcccggattagggaaaaatataccttttatgattggagttctttgtgggggaattatatttggaacagtagcagggtttgtctctatggttccttatatgatgaaagatgttcaccagctaagtactgccgaaatcggaagtgtaattattttccctggaacaatgagtgtcattattttcggctacattggtgggatacttgttgatagaagaggtcctttatacgtgttaaacatcggagttacatttctttctgttagctttttaactgcttcctttcttttagaaacaacatcatggttcatgacaattataatcgtatttgttttaggtgggctttcgttcaccaaaacagttatatcaacaattgtttcaagtagcttgaaacagcaggaagctggtgctggaatgagtttgcttaactttaccagctttttatcagagggaacaggtattgcaattgtaggtggtttattatccatacccttacttgatcaaaggttgttacctatggaagttgatcagtcaacttatctgtatagtaatttgttattacttttttcaggaatcattgtcattagttggctggttaccttgaatgtatataaacattctcaaagggatttctaaatcgttaagggatcaactttgggagagagttcaaaattgatcctttttttataacaggaattgggcatcaaataaaacgaaaggctcagtcgaaagactgggcctttcgttttatctgttgtttgtcggtgaacgctctcctgagtaggacaaatccgccgggagcggatttgaacgttgcgaagcaacggcccggagggtggcgggcaggacgcccgccataaactgccaggcatcaaattaagcagaaggccatcctgacggatggcctttttgcgtttctacaaactcttcctgtcgtcatatctacaattctacacagcccagtccagactattgaattgtatcacgtttttgatatcctaccaataacaaattgattggaggaatgcaaagtgaataatgaaccagtaaaacgtggtaagaagaacagatgggaattaaacctacctataatgacttatgtagtagctgatgattggattgataaactaggacacgaaacgtttactttatggttgaggttccatacttgggtagatagagaagatgaactccgagattatgatcgcatacctagaagttttgagaacatatataaaaagacactaggaatctcaaaaagtaagttttatagattgataaaacctttatgggaatatggattaatagacatcatagaatacgaagaatctaaccgtaattctactaaacctaaaaatataattgtttatgagtatcctttacacgaaatagaaagaaagtataaaccactagaaaaattaagagattgggataaagactataattccgtttctaaagaattaggtaaaacaggtggtagaccaaggaaaaaagatagtgaagaagaacccgaaaagaaacccgaagaagtaactaaaaagaaacgtaaatataagttaaaaagagttatccacaacggtttcaaaaatgaaacggtggagggtttcaaaaatgaaacggtggagggtttcaaaaatgaaacggtgaccgtttcaaaaataaaacccaataattattcaaatatctttaataacttatcaaatatttctactaatgtttcaaataatttattaattgatgatgatgaggaaatcgaaaatgaaccaactggtcgtacaataaataggtcattacttttttcacaagaagatattaaacaggcctatcaatttattaatagattttcagttatacagttacgtgaaaactttagctttgataaacactttgaagaacggttggtatgttatttatggaaagcagggatttctactttttacacgcacgaaatcagtaaaatgataaaaaaaatagcagactatgaaaaatctaaaaaaggtagattaaacccaatacgtgaccgagccttatatatggtaaatggtcttgtaatgaatagagcttcttcccaaagtgaacatgctacttataaactaaaccaatataaaaaacagaaggaacaggaaaaacaacaacaggagcaacaaagatcaagagtaccgttctataattggttggaggaaagagaagaacaaaccgaaggtcaactacccaccacttaagcggccgcaagcttgaagagctcttctttcagaacgctcggttgccgccgggcgttttttatgagacgtctcattatactggcttaactatgcggcatcagagcagattgtactgagagtgcaccatatgcggtgtgaaataccgcacagatgcgtaaggagaaaataccgcatcaggcgctcttccgcttcctcgctcactgactcgctgcgctcggtcgttcggctgcggcgagcggtatcagctcactcaaaggcggtaatacggttatccacagaatcaggggataacgcaggaaagaacatgtgagcaaaaggccagcaaaaggccaggaaccgtaaaaaggccgcgttgctggcgtttttccataggctccgcccccctgacgagcatcacaaaaatcgacgctcaagtcagaggtggcgaaacccgacaggactataaagataccaggcgtttccccctggaagctccctcgtgcgctctcctgttccgaccctgccgcttaccggatacctgtccgcctttctcccttcgggaagcgtggcgctttctcatagctcacgctgtaggtatctcagttcggtgtaggtcgttcgctccaagctgggctgtgtgcacgaaccccccgttcagcccgaccgctgcgccttatccggtaactatcgtcttgagtccaacccggtaagacacgacttatcgccactggcagcagccactggtaacaggattagcagagcgaggtatgtaggcggtgctacagagttcttgaagtggtggcctaactacggctacactagaaggacagtatttggtatctgcgctctgctgaagccagttaccttcggaaaaagagttggtagctcttgatccggcaaacaaaccaccgctggtagcggtggtttttttgtttgcaagcagcagattacgcgcagaaaaaaaggatctcaagaagatcctttgatcttttctacggggtctgacgctcagtggaacgaaaactcacgttaagggattttggtcatgagattatcaaaaaggatcttcacctagatccttttaaattaaaaatgaagttttaaatcaatctaaagtatatatgagtaaacttggtctgacagttaccaatgcttaatcagtgaggcacctatctcagcgatctgtctatttcgttcatccatagttgcctgactccccgtcgtgtagataactacgatacgggagggcttaccatctggccccagtgctgcaatgataccgcgagacccacgctcaccggctccagatttatcagcaataaaccagccagccggaagggccgagcgcagaagtggtcctgcaactttatccgcctccatccagtctattaattgttgccgggaagctagagtaagtagttcgccagttaatagtttgcgcaacgttgttgccattgctgcaggcatcgtggtgtcacgctcgtcgtttggtatggcttcattcagctccggttcccaacgatcaaggcgagttacatgatcccccatgttgtgcaaaaaagcggttagctccttcggtcctccgatcgttgtcagaagtaagttggccgcagtgttatcactcatggttatggcagcactgcataattctcttactgtcatgccatccgtaagatgcttttctgtgactggtgagtactcaaccaagtcattctgagaatagtgtatgcggcgaccgagttgctcttgcccggcgtcaacacgggataataccgcgccacatagcagaactttaaaagtgctcatcattggaaaacgttcttcggggcgaaaactctcaaggatcttaccgctgttgagatccagttcgatgtaacccactcgtgcacccaactgatcttcagcatcttttactttcaccagcgtttctgggtgagcaaaaacaggaaggcaaaatgccgcaaaaaagggaataagggcgacacggaaatgttgaatactcatactcttcctttttcaatattattgaagcatttatcagggttattgtctcatgagcggatacatatttgaatgtatttagaaaaataaacaaataggggttccgcgcacatttccccgaaaagtgccacctgacgtctaagaaaccattattatcatgacattaacctataaaaataggcgtatcacgaggccctttcgtcttcaagaattctcatgtttgacagcttatcatcgataagcttgggcctgtttggcc

SEQ ID NO: 246 - DNA, 17399 bp, synthetic construct
  misc_feature 1..17399: note = Seed plasmid #18
  source 1..17399: mol_type = other DNA
ggcctgtttggccacgcggtaggaggaggggagggtgccctgcatgtctgccgctgctcttgctcttgccgctgctgaggaggggggcgcatctgccgcagcaccggatgcatctgggaaaagcaaaaaaggggctcgtccctgtttccggaggaatttgcaagcggggtcttgcatgacggggaggcaaacccccgttcgccgcagtccggccggtccgagactcgaaccgggggtcccgcgactcaacccttggaaaataaccctccggctacagggagcgagccacttaatgctttcgctttccagcctaaccgcttacgctgcgcgcggccagtggccaaaaaagctagcgcagcagccgccgcgcctggaaggaagccaaaaggagcactcccccgttgtctgacgtcgcacacctgggttcgacacgcgggcggtaaccgcatggatcacggcggacggccggatacggggctcgaaccccggtcgtccgccatgatacccttgcgaatttatccaccagaccacggaagagtgcccgcttacaggctctccttttgcacggtctagagcgtcaacgattgcgcgcgcctgaccggccagagcgtcccgaccatggagcactttttgccgctgcgcaacatctggaaccgcgtccgcgactttccgcgcgcctccaccaccgccgccggcatcacctggatgtccaggtacatctaccaattgacatgtgagcaaaaggccagcaaaaggccaggaaccgtaaaaaggccgcgttgctggcgttggccttgatggccggctccggtgcccgtcagtgggcagagcgcacatcgcccacagtccccgagaagttggggggaggggtcggcaattgaaccggtgcctagagaaggtggcgcggggtaaactgggaaagtgatgtcgtgtactggctccgcctttttcccgagggtgggggagaaccgtatataagtgcagtagtcgccgtgaacgttctttttcgcaacgggtttgccgccagaacacaggtaagtgccgtgtgtggttcccgcgggcctggcctctttacgggttatggcccttgcgtgccttgaattacttccacctggctgcagtacgtgattcttgatcccgagcttcgggttggaagtgggtgggagagttcgaggccttgcgcttaaggagccccttcgcctcgtgcttgagttgaggcctggcctgggcgctggggccgccgcgtgcgaatctggtggcaccttcgcgcctgtctcgctgctttcgataagtctctagccatttaaaatttttgatgacctgctgcgacgctttttttctggcaagatagtcttgtaaatgcgggccaagatctgcacactggtatttcggtttttggggccgcgggcggcgacggggcccgtgcgtcccagcgcacatgttcggcgaggcggggcctgcgagcgcggccaccgagaatcggacgggggtagtctcaagctggccggcctgctctggtgcctggtctcgcgccgccgtgtatcgccccgccctgggcggcaaggctggcccggtcggcaccagttgcgtgagcggaaagatggccgcttcccggccctgctgcagggagctcaaaatggaggacgcggcgctcgggagagcgggcgggtgagtcacccacacaaaggaaaagggcctttccgtcctcagccgtcgcttcatgtgactccacggagtaccgggcgccgtccaggcacctcgattagttctcgagcttttggagtacgtcgtctttaggttggggggaggggttttatgcgatggagtttccccacactgagtgggtggagactgaagttaggccagcttggcacttgatgtaattctccttggaatttgccctttttgagtttggatcttggttcattctcaagcctcagacagtggttcaaagtttttttcttccatttcaggtgtcgtgagccaccatggccagtcgggaagaggagcagcgcgaaaccacccccgagcgcggacgcggtgcggcgcgacgtcccccaaccatggaggacgtgtcgtccccgtccccgtcgccgccgcctccccgggcgcccccaaaaaagcggatgaggcggcgtatcgagtccgaggacgaggaagactcatcacaagacgcgctggtgccgcgcacacccagcccgcggccatcgacctcggcggcggatttggccattgcgcccaagaagaaaaagaagcgcccttctcccaagcccgagcgcccgccatcaccagaggtaatcgtggacagcgaggaagaaagagaagatgtggcgctacaaatggtgggtttcagcaacccaccggtgctaatcaagcatggcaaaggaggtaagcgcacagtgcggcggctgaatgaagacgacccagtggcgcgtggtatgcggacgcaagaggaagaggaagagcccagcgaagcggaaagtgaaattacggtgatgaacccgctgagtgtgccgatcgtgtctgcgtgggagaagggcatggaggctgcgcgcgcgctgatggacaagtaccacgtggataacgatctaaaggcgaacttcaaactactgcctgaccaagtggaagctctggcggccgtatgcaagacctggctgaacgaggagcaccgcgggttgcagctgaccttcaccagcaacaagacctttgtgacgatgatggggcgattcctgcaggcgtacctgcagtcgtttgcagaggtgacctacaagcatcacgagcccacgggctgcgcgttgtggctgcaccgctgcgctgagatcgaaggcgagcttaagtgtctacacggaagcattatgataaataaggagcacgtgattgaaatggatgtgacgagcgaaaacgggcagcgcgcgctgaaggagcagtctagcaaggccaagatcgtgaagaaccggtggggccgaaatgtggtgcagatctccaacaccgacgcaaggtgctgcgtgcacgacgcggcctgtcctgccaatcagttttccggcaagtcttgcggcatgttcttctctgaaggcgcaaaggctcaggtggcttttaagcagatcaaggcttttatgcaggcgctgtatcctaacgcccagaccgggcacggtcaccttttgatgccactacggtgcgagtgcaactcaaagcctgggcacgcgccctttttgggaaggcagctaccaaagttgactccgttcgccctgagcaacgcggaggacctggacgcggatctgatctccgacaagagcgtgctggccagcgtgcaccacccggcgctgatagtgttccagtgctgcaaccctgtgtatcgcaactcgcgcgcgcagggcggaggccccaactgcgacttcaagatatcggcgcccgacctgctaaacgcgttggtgatggtgcgcagcctgtggagtgaaaacttcaccgagctgccgcggatggttgtgcctgagtttaagtggagcactaaacaccagtatcgcaacgtgtccctgccagtggcgcatagcgatgcgcggcagaacccctttgatttttaagatggccggccgcttcgagcagacatgataagatacattgatgagtttggacaaaccacaactagaatgcagtgaaaaaaatgctttatttgtgaaatttgtgatgctattgctttatttgtaaccattataagctgcaataaacaagttaacaacaacaattgcattcattttatgtttcaggttcagggggaggtgtgggaggttttttaaagcaagtaaaacctctacaaatgtggtagcggccgcggcgctcttccgcttcctcgctcactgactcgctgcgctcggtcgttcggctgcggcgagcggtatcagctcactcaaaggcggtaatacggttatccacagaatcaggggataacgcaggaaagaacatgtgagcaaaaggccagcaaaaggccaggaaccgtaaaaaggccgcgttgctggcgttggcctacttggccttctaccgggtaggggaggcgcttttcccaaggcagtctggagcatgcgctttagcagccccgctgggcacttggcgctacacaagtggcctctggcctcgcacacattccacatccaccggtaggcgccaaccggctccgttctttggtggccccttcgcgccaccttctactcctcccctagtcaggaagttcccccccgccccgcagctcgcgtcgtgcaggacgtgacaaatggaagtagcacgtctcactagtctcgtgcagatggacagcaccgctgagcaatggaagcgggtaggcctttggggcagcggccaatagcagctttgctccttcgctttctgggctcagaggctgggaaggggtgggtccgggggcgggctcaggggcgggctcaggggcggggcgggcgcccgaaggtcctccggaggcccggcattctgcacgcttcaaaagcgcacgtctgccgcgctgttctcctcttcctcatctccgggcctttcgacctgccaccatgactacgtccggcgttccatttggcatgacactacgaccaacacgatctcggttgtctcggcgcactccgtacagtagggatcgtctacctccttttgagacagaaacccgcgctaccatactggaggatcatccgctgctgcccgaatgtaacactttgacaatgcacaacgtgagttacgtgcgaggtcttccctgcagtgtgggatttacgctgattcaggaatgggttgttccctgggatatggttctaacgcgggaggagcttgtaatcctgaggaagtgtatgcacgtgtgcctgtgttgtgccaacattgatatcatgacgagcatgatgatccatggttacgagtcctgggctctccactgtcattgttccagtcccggttccctgcagtgtatagccggcgggcaggttttggccagctggtttaggatggtggtggatggcgccatgtttaatcagaggtttatatggtaccgggaggtggtgaattacaacatgccaaaagaggtaatgtttatgtccagcgtgtttatgaggggtcgccacttaatctacctgcgcttgtggtatgatggccacgtgggttctgtggtccccgccatgagctttggatacagcgccttgcactgtgggattttgaacaatattgtggtgctgtgctgcagttactgtgctgatttaagtgagatcagggtgcgctgctgtgcccggaggacaaggcgccttatgctgcgggcggtgcgaatcatcgctgaggagaccactgccatgttgtattcctgcaggacggagcggcggcggcagcagtttattcgcgcgctgctgcagcaccaccgccctatcctgatgcacgattatgactctacccccatgtaagaattcctagagctcgctgatcagcctcgactgtgccttctagttgccagccatctgttgtttgcccctcccccgtgccttccttgaccctggaaggtgccactcccactgtcctttcctaataaaatgaggaaattgcatcgcattgtctgagtaggtgtcattctattctggggggtggggtggggcaggacagcaagggggaggattgggaagagaatagcaggcatgctggggaggccttgttggccggtgcagcggcctccgcgccgggttttggcgcctcccgcgggcgcccccctcctcacggcgagcgctgccacgtcagacgaagggcgcagcgagcgtcctgatccttccgcccggacgctcaggacagcggcccgctgctcataagactcggccttagaaccccagtatcagcagaaggacattttaggacgggacttgggtgactctagggcactggttttctttccagagagcggaacaggcgaggaaaagtagtcccttctcggcgattctgcggagggatctccgtggggcggtgaacgccgatgattatataaggacgcgccgggtgtggcacagctagttccgtcgcagccgggatttgggtcgcggttcttgtttgtggatcgctgtgatcgtcacttggtgagtagcgggctgctgggctggccggggctttcgtggccgccgggccgctcggtgggacggaagcgtgtggagagaccgccaagggctgtagtctgggtccgcgagcaaggttgccctgaactgggggttggggggagcgcagcaaaatggcggctgttcccgagtcttgaatggaagacgcttgtgaggcgggctgtgaggtcgttgaaacaaggtggggggcatggtgggcggcaagaacccaaggtcttgaggccttcgctaatgcgggaaagctcttattcgggtgagatgggctggggcaccatctggggaccctgacgtgaagtttgtcactgactggagaactcggtttgtcgtctgttgcgggggcggcagttatggcggtgccgttgggcagtgcacccgtacctttgggagcgcgcgccctcgtcgtgtcgtgacgtcacccgttctgttggcttataatgcagggtggggccacctgccggtaggtgtgcggtaggcttttctccgtcgcaggacgcagggttcgggcctagggtaggctctcctgaatcgacaggcgccggacctctggtgaggggagggataagtgaggcgtcagtttctttggtcggttttatgtacctatcttcttaagtagctgaagctccggttttgaactatgcgctcggggttggcgagtgtgttttgtgaagttttttaggcaccttttgaaatgtaatcatttgggtcaatatgtaattttcagtgttagactagtaaagccaccatggctgccgatggttatcttccagattggctcgaggacaacctctctgagggcattcgcgagtggtgggacttgaaacctggagccccgaagcccaaagccaaccagcaaaagcaggacgacggccggggtctggtgcttcctggctacaagtacctcggacccttcaacggactcgacaagggggagcccgtcaacgcggcggacgcagcggccctcgagcacgacaaggcctacgaccagcagctcaaagcgggtgacaatccgtaccttcggtataaccacgccgacgccgagtttcaggagcgtctgcaagaagatacgtcttttgggggcaacctcgggcgagcagtcttccaggccaagaagcgggttctcgaacctctcggtctggttgaggaaggcgctaagacggctcctggaaagaaacgtccggtagagcagtcgccacaagagccagactcctcctcgggcatcggcaagacaggccagcagcccgctaaaaagagactcaattttggtcagactggcgactcagagtcagtccccgacccacaacctctcggagaacctccagcaacccccgctgctgtgggacctactacaatggcttcaggcggtggcgcaccaatggcagacaataacgaaggcgccgacggagtgggtaatgcctcaggaaattggcattgcgattccacatggctgggcgacagagtcatcaccaccagcacccgcacctgggccttgcccacctacaataaccacctctacaagcaaatctccagtgcttcaacgggggccagcaacgacaaccactacttcggctacagcaccccctgggggtattttgatttcaacagattccactgccacttttcaccacgtgactggcagcgactcatcaacaacaattggggattccggcccaagagactcaacttcaaactcttcaacatccaagtcaaggaggtcacgacgaatgatggcgtcacaaccatcgctaataaccttaccagcacggttcaagtcttctcggactcggagtaccagcttccgtacgtcctcggctctgcgcaccagggctgcctccctccgttcccggcggacgtgttcatgattccgcaatacggctacctgacgctcaacaatggcagccaagccgtgggacgttcatccttttactgcctggaatatttcccttctcagatgctgagaacgggcaacaactttaccttcagctacacctttgaggaagtgcctttccacagcagctacgcgcacagccagagcctggaccggctgatgaatcctctcatcgaccaatacctgtattacctgaacagaactcaaaatcagtccggaagtgcccaaaacaaggacttgctgtttagccgtgggtctccagctggcatgtctgttcagcccaaaaactggctacctggaccctgttatcggcagcagcgcgtttctaaaacaaaaacagacaacaacaacagcaattttacctggactggtgcttcaaaatataacctcaatgggcgtgaatccatcatcaaccctggcactgctatggcctcacacaaagacgacgaagacaagttctttcccatgagcggtgtcatgatttttggaaaagagagcgccggagcttcaaacactgcattggacaatgtcatgattacagacgaagaggaaattaaagccactaaccctgtggccaccgaaagatttgggaccgtggcagtcaatttccagagcagcagcacagaccctgcgaccggagatgtgcatgctatgggagcattacctggcatggtgtggcaagatagagacgtgtacctgcagggtcccatttgggccaaaattcctcacacagatggacactttcacccgtctcctcttatgggcggctttggactcaagaacccgcctcctcagatcctcatcaaaaacacgcctgttcctgcgaatcctccggcggagttttcagctacaaagtttgcttcattcatcacccaatactccacaggacaagtgagtgtggaaattgaatgggagctgcagaaagaaaacagcaagcgctggaatcccgaagtgcagtacacatccaattatgcaaaatctgccaacgttgattttactgtggacaacaatggactttatactgagcctcgccccattggcacccgttaccttacccgtcccctgtaatctctagagtcgacactagtgcggatccacgggtggcatccctgtgacccctccccagtgcctctcctggccctggaagttgccactccagtgcccaccagccttgtcctaataaaattaagttgcatcattttgtctgactaggtgtccttctataatattatggggtggaggggggtggtatggagcaaggggcaagttgggaagacaacctgtagggcctgcggggtctattgggaaccaagctggagtgcagtggcacaatcttggctcactgcaatctccgcctcctgggttcaagcgattctcctgcctcagcctcccgagttgttgggattccaggcatgcatgaccaggctcagctaatttttgtttttttggtagagacggggtttcaccatattggccaggctggtctccaactcctaatctcaggtgatctacccaccttggcctcccaaattgctgggattacaggcgtgaaccactgctcccttccctgtccttatcgatagatctggcctgattggccggaggggtggagtcgtgacgtgaattacgtcatagggttagggaggtcctgtattagaggtcacgtgagtgttttgcgacattttgcgacaccatgtggtcacgctgggtatttaagcccgagtgagcacgcagggtctccattttgaagcgggaggtttgaacgcgcagccgccatgccggggttttacgagattgtgattaaggtccccagcgaccttgacgagcatctgcccggcatttctgacagctttgtgaactgggtggccgagaaggaatgggagttgccgccagattctgacatggatctgaatctgattgagcaggcacccctgaccgtggccgagaagctgcagcgcgactttctgacggaatggcgccgtgtgagtaaggctccggaggcccttttctttgtgcaatttgagaagggagagagctacttccacatgcacgtgctcgtggaaaccaccggggtgaaatccatggttttgggacgtttcctgagtcagattcgcgaaaaactgattcagagaatttaccgcgggatcgagccgactttgccaaactggttcgcggtcacaaagaccagaaatggcgccggaggcgggaacaaggtggtggatgagtgctacatccccaattacttgctccccaaaacccagcctgagctccagtgggcgtggactaatatggaacagtatttaagcgcctgtttgaatctcacggagcgtaaacggttggtggcgcagcatctgacgcacgtgtcgcagacgcaggagcagaacaaagagaatcagaatcccaattctgatgcgccggtgatcagatcaaaaacttcagccaggtacatggagctggtcgggtggctcgtggacaaggggattacctcggagaagcagtggatccaggaggaccaggcctcatacatctccttcaatgcggcctccaactcgcggtcccaaatcaaggctgccttggacaatgcgggaaagattatgagcctgactaaaaccgcccccgactacctggtgggccagcagcccgtggaggacatttccagcaatcggatttataaaattttggaactaaacgggtacgatccccaatatgcggcttccgtctttctgggatgggccacgaaaaagttcggcaagaggaacaccatctggctgtttgggcctgcaactaccgggaagaccaacatcgcggaggccatagcccacactgtgcccttctacgggtgcgtaaactggaccaatgagaactttcccttcaacgactgtgtcgacaagatggtgatctggtgggaggaggggaagatgaccgccaaggtcgtggagtcggccaaagccattctcggaggaagcaaggtgcgcgtggaccagaaatgcaagtcctcggcccagatagacccgactcccgtgatcgtcacctccaacaccaacatgtgcgccgtgattgacgggaactcaacgaccttcgaacaccagcagccgttgcaagaccggatgttcaaatttgaactcacccgccgtctggatcatgactttgggaaggtcaccaagcaggaagtcaaagactttttccggtgggcaaaggatcacgtggttgaggtggagcatgaattctacgtcaaaaagggtggagccaagaaaagacccgcccccagtgacgcagatataagtgagcccaaacgggtgcgcgagtcagttgcgcagccatcgacgtcagacgcggaagcttcgatcaactacgcagacaggtaccaaaacaaatgttctcgtcacgtgggcatgaatctgatgctgtttccctgcagacaatgcgagagaatgaatcagaattcaaatatctgcttcactcacggacagaaagactgtttagagtgctttcccgtgtcagaatctcaacccgtttctgtcgtcaaaaaggcgtatcagaaactgtgctacattcatcatatcatgggaaaggtgccagacgcttgcactgcctgcgatctggtcaatgtggatttggatgactgcatctttgaacaataaatgatttaaatcaggtatggctgccgatggttatcttccagattggctcgaggacaacctctctaaaataaaaagacagaataaacctattggttaaaaaatgagctgatttaacggccttcttggccgcccttcccggtcgatatgaacagcttatttacataattcacgttattggtagttataaatgaaattcctaatatcggttatgaagtgaaattgaatttctacttgatctttctctctatttttgtaaaataaaattaagaatatttaaatattcaatgattcatttttgcagaaatcggaggaagaagaatatatgaaaacatttaacatttctcaacaagatccccccatattgttgtataagtgatgaaatactgaatttaaaacttagtttatatgtggtaaaatgttttaatcaagtttaggaggaattaattatgaagtgtaatgaataatgaatgtaacagggttcaattaaaagagggaagcgtatcattaaccctataaactacgtctgccctcattattggagggtgaaatgtgaatacatcctattcacaatcgaatttacgacacaaccaaattttaatttggctttgcattttatctttttttagcgtattaaatgaaatggttttgaacgtctcattacctgatattgcaaatgattttaataaaccaccagcgagtacaaactgggtgaacacagcctttatgttaaccttttccattggaacagctgtatatggaaagctatctgatcaattaggcatcaaaaggttactcctatttggaattataataaattgtttcgggtcggtaattgggtttgttggccattctttcttttccttacttattatggctcgttttattcaaggggctggtgcagctgcatttccagcactcgtaatggttgtagttgcgcgctatattccaaaggaaaataggggtaaagcatttggtcttattggatcgatagtagccatgggagaaggagtcggtccagcgattggtggaatgatagcccattatattcattggtcctatcttctactcattcctatgataacaattatcactgttccgtttcttatgaaattattaaagaaagaagtaaggataaaaggtcattttgatatcaaaggaattatactaatgtctgtaggcattgtattttttatgttgtttacaacatcatatagcatttcttttcttatcgttagcgtgctgtcattcctgatatttgtaaaacatatcaggaaagtaacagatccttttgttgatcccggattagggaaaaatataccttttatgattggagttctttgtgggggaattatatttggaacagtagcagggtttgtctctatggttccttatatgatgaaagatgttcaccagctaagtactgccgaaatcggaagtgtaattattttccctggaacaatgagtgtcattattttcggctacattggtgggatacttgttgatagaagaggtcctttatacgtgttaaacatcggagttacatttctttctgttagctttttaactgcttcctttcttttagaaacaacatcatggttcatgacaattataatcgtatttgttttaggtgggctttcgttcaccaaaacagttatatcaacaattgtttcaagtagcttgaaacagcaggaagctggtgctggaatgagtttgcttaactttaccagctttttatcagagggaacaggtattgcaattgtaggtggtttattatccatacccttacttgatcaaaggttgttacctatggaagttgatcagtcaacttatctgtatagtaatttgttattacttttttcaggaatcattgtcattagttggctggttaccttgaatgtatataaacattctcaaagggatttctaaatcgttaagggatcaactttgggagagagttcaaaattgatcctttttttataacaggaattgggcatcaaataaaacgaaaggctcagtcgaaagactgggcctttcgttttatctgttgtttgtcggtgaacgctctcctgagtaggacaaatccgccgggagcggatttgaacgttgcgaagcaacggcccggagggtggcgggcaggacgcccgccataaactgccaggcatcaaattaagcagaaggccatcctgacggatggcctttttgcgtttctacaaactcttcctgtcgtcatatctacaattctacacagcccagtccagactattgaattgtatcacgtttttgatatcctaccaataacaaattgattggaggaatgcaaagtgaataatgaaccagtaaaacgtggtaagaagaacagatgggaattaaacctacctataatgacttatgtagtagctgatgattggattgataaactaggacacgaaacgtttactttatggttgaggttccatacttgggtagatagagaagatgaactccgagattatgatcgcatacctagaagttttgagaacatatataaaaagacactaggaatctcaaaaagtaagttttatagattgataaaacctttatgggaatatggattaatagacatcatagaatacgaagaatctaaccgtaattctactaaacctaaaaatataattgtttatgagtatcctttacacgaaatagaaagaaagtataaaccactagaaaaattaagagattgggataaagactataattccgtttctaaagaattaggtaaaacaggtggtagaccaaggaaaaaagatagtgaagaagaacccgaaaagaaacccgaagaagtaactaaaaagaaacgtaaatataagttaaaaagagttatccacaacggtttcaaaaatgaaacggtggagggtttcaaaaatgaaacggtggagggtttcaaaaatgaaacggtgaccgtttcaaaaataaaacccaataattattcaaatatctttaataacttatcaaatatttctactaatgtttcaaataatttattaattgatgatgatgaggaaatcgaaaatgaaccaactggtcgtacaataaataggtcattacttttttcacaagaagatattaaacaggcctatcaatttattaatagattttcagttatacagttacgtgaaaactttagctttgataaacactttgaagaacggttggtatgttatttatggaaagcagggatttctactttttacacgcacgaaatcagtaaaatgataaaaaaaatagcagactatgaaaaatctaaaaaaggtagattaaacccaatacgtgaccgagccttatatatggtaaatggtcttgtaatgaatagagcttcttcccaaagtgaacatgctacttataaactaaaccaatataaaaaacagaaggaacaggaaaaacaacaacaggagcaacaaagatcaagagtaccgttctataattggttggaggaaagagaagaacaaaccgaaggtcaactacccaccacttaagcggccgcaagcttgaagagctcttctttcagaacgctcggttgccgccgggcgttttttatgagacgtctcattatactggcttaactatgcggcatcagagcagattgtactgagagtgcaccatatgcggtgtgaaataccgcacagatgcgtaaggagaaaataccgcatcaggcgctcttccgcttcctcgctcactgactcgctgcgctcggtcgttcggctgcggcgagcggtatcagctcactcaaaggcggtaatacggttatccacagaatcaggggataacgcaggaaagaacatgtgagcaaaaggccagcaaaaggccaggaaccgtaaaaaggccgcgttgctggcgtttttccataggctccgcccccctgacgagcatcacaaaaatcgacgctcaagtcagaggtggcgaaacccgacaggactataaagataccaggcgtttccccctggaagctccctcgtgcgctctcctgttccgaccctgccgcttaccggatacctgtccgcctttctcccttcgggaagcgtggcgctttctcatagctcacgctgtaggtatctcagttcggtgtaggtcgttcgctccaagctgggctgtgtgcacgaaccccccgttcagcccgaccgctgcgccttatccggtaactatcgtcttgagtccaacccggtaagacacgacttatcgccactggcagcagccactggtaacaggattagcagagcgaggtatgtaggcggtgctacagagttcttgaagtggtggcctaactacggctacactagaaggacagtatttggtatctgcgctctgctgaagccagttaccttcggaaaaagagttggtagctcttgatccggcaaacaaaccaccgctggtagcggtggtttttttgtttgcaagcagcagattacgcgcagaaaaaaaggatctcaagaagatcctttgatcttttctacggggtctgacgctcagtggaacgaaaactcacgttaagggattttggtcatgagattatcaaaaaggatcttcacctagatccttttaaattaaaaatgaagttttaaatcaatctaaagtatatatgagtaaacttggtctgacagttaccaatgcttaatcagtgaggcacctatctcagcgatctgtctatttcgttcatccatagttgcctgactccccgtcgtgtagataactacgatacgggagggcttaccatctggccccagtgctgcaatgataccgcgagacccacgctcaccggctccagatttatcagcaataaaccagccagccggaagggccgagcgcagaagtggtcctgcaactttatccgcctccatccagtctattaattgttgccgggaagctagagtaagtagttcgccagttaatagtttgcgcaacgttgttgccattgctgcaggcatcgtggtgtcacgctcgtcgtttggtatggcttcattcagctccggttcccaacgatcaaggcgagttacatgatcccccatgttgtgcaaaaaagcggttagctccttcggtcctccgatcgttgtcagaagtaagttggccgcagtgttatcactcatggttatggcagcactgcataattctcttactgtcatgccatccgtaagatgcttttctgtgactggtgagtactcaaccaagtcattctgagaatagtgtatgcggcgaccgagttgctcttgcccggcgtcaacacgggataataccgcgccacatagcagaactttaaaagtgctcatcattggaaaacgttcttcggggcgaaaactctcaaggatcttaccgctgttgagatccagttcgatgtaacccactcgtgcacccaactgatcttcagcatcttttactttcaccagcgtttctgggtgagcaaaaacaggaaggcaaaatgccgcaaaaaagggaataagggcgacacggaaatgttgaatactcatactcttcctttttcaatattattgaagcatttatcagggttattgtctcatgagcggatacatatttgaatgtatttagaaaaataaacaaataggggttccgcgcacatttccccgaaaagtgccacctgacgtctaagaaaccattattatcatgacattaacctataaaaataggcgtatcacgaggccctttcgtcttcaagaattctcatgtttgacagcttatcatcgataagcttgggcctgtttggcc
